(19) United States
(12) Patent Application Publication
(10) Pub. No.: US 2008/0274959 A1
(43) Pub. Date: Nov. 6, 2008

(54) Actinomadura Chromoprotein, Apoprotein and Gene Cluster

(75) Inventors: Bradley A. Haltli, Monroe, NY (US); Haiyin He, Mahwah, NJ (US); Ying Huang, Wayland, MA (US); Sridhar Krishna Rabindran, Malvern, PA (US); Jiang Wu, Lexington, MA (US); Min He, Congers, NY (US)

Correspondence Address: WYETH;PATENT LAW GROUP, 5 GIRALDA FARMS, MADISON, NJ, 07940, US

(73) Assignee: Wyeth, Madison, NJ (US)

(21) Appl. No.: 11/794,068

(22) PCT Filed: Dec. 16, 2005
(86) PCT No.: PCT/US2005/045818

§ 371 Date: Nov. 28, 2007

Related U.S. Application Data
(60) Provisional application No. 60/637,391, filed on Dec. 17, 2004.

(51) Int. Cl. A61K 38/16; C07H 21/04; C12N 15/63; C12N 1/21; C12N 1/15; C12P 21/00; C07H 17/08; C07K 14/37; G01N 33/566; C12N 1/14; G01N 33/53; A61P 35/00

(52) U.S. Cl. 514/12; 536/23.74; 435/320.1; 435/252.35; 435/254.11; 435/252.33; 435/69.1; 536/24.5; 436/501; 435/254.1; 435/7.2; 435/7.31; 536/7.1

(57) ABSTRACT

The present invention provides a chromoprotein produced by Actinomadura sp. 21G792, as well as amino acid and nucleic acid sequences of the apoprotein component of the chromoprotein and of components of the biosynthetic pathway for the chromophore. The present invention is useful for developing pharmaceutical and treating diseases such as cancer or bacterial infections.

### FIELD OF THE INVENTION

[0001] The present invention provides a chromoprotein produced by Actinomadura sp. 21G792, as well as amino acid and nucleic acid sequences of the apoprotein component of the chromoprotein and of components of the biosynthetic pathway for the chromophore. The present invention is useful for developing pharmaceutical compositions and treating diseases such as cancer or bacterial infections.

### BACKGROUND OF THE INVENTION

[0002] Enediynes, a potent class of cytotoxic polyketides produced by members of the Actinomycetales, have been used to treat cancer. The typical mode of action of the enediyne drugs is through single- and double-strand DNA cleavage. DNA cleavage is induced by hydrogen abstraction from the deoxyribose sugar backbone by a diradical generated from a Bergman-type cycloaromatization of the enediyne ring. Two enediynes are currently approved for the clinical treatment of cancer: calicheamicin conjugated to a CD33 monoclonal antibody (Mylotarg®, USA) and poly(styrene-co-maleic acid)-conjugated neocarzinostatin (Japan).

[0003] Enediyne natural products can be divided into two sub-categories. The first sub-class is characterized by a bicyclo[7,3,0]dodecadiyne (i.e., nine-membered) enediyne core or its precursor, and the second sub-class is characterized by a bicylco[7,3,1]tridecadiyne (i.e., ten-membered) enediyne core. Examples of the nine-membered enediynes include neocarzinostatin, C-1027, kedarcidin, macromomycin, N1999A2 and maduropeptin. Examples of the ten-membered sub-class include calicheamicin, esperamicin, dynemicin and namenamicin. An additional characteristic that distinguishes the nine-membered from the ten-membered enediynes is that with the exception of N1999A2, all nine-membered enediynes are produced as enediyne-protein complexes, wherein the enediyne chromophore is attached to an inactive apoprotein by non-covalent binding. For this reason the nine-membered enediynes are often referred to as chromoproteins. It is believed that the apoprotein plays the critical role of stabilizing the labile nine-membered enediyne chromophore and providing the targeted delivery of the cytotoxic chromophore to the chromatin.

[0004] The amino acid sequences of several apoproteins have been determined by directly sequencing the apoprotein or by deducing the amino acid from a cloned DNA sequence. The apoproteins identified to date are small, acidic proteins (108-114 amino acids, aa), which are generated from a pre-apoprotein by the removal of a 32-34 aa amino-terminal leader peptide. The biosynthetic pathways for two chromoproteins (neocarzinostatin and C-1027) have been cloned and sequenced. In these cases, the gene encoding the apoprotein was clustered with the genes required for the biosynthesis of the associated chromophore.

[0005] The apoprotein component of the chromoprotein complex presents an attractive target for the directed alteration of drug properties. For example, if the apoprotein amino acid or nucleic acid sequence is discovered, the chromophore-binding motif of the apoprotein can be altered using established molecular biology techniques, such as site-directed mutagenesis, to create a rationally altered apoprotein that binds its natural chromophore more strongly or weakly. Moreover, such alterations to the apoprotein could lead to, for example, a chromoprotein having decreased toxicity, or a chromophore having increased potency or stability. Additionally, extensive manipulation of the apoprotein could lead to an apoprotein with greatly altered binding specificities and, thus, the ability to function as a targeted drug delivery vehicle for molecules very different from the enediyne chromophore.

[0006] Accordingly, there exists a need for novel chromoproteins, and for isolation and characterization of the genes and proteins involved in their synthesis.

### SUMMARY OF THE INVENTION

[0007] The present invention relates to a novel highly potent anti-cancer chromoprotein produced by a terrestrial actinomycete, Actinomadura sp. 21G792 (NRRL 30778). The Actinomadura sp. 21G792 chromoprotein is a non-covalent complex of an apoprotein and a chromophore comprising a nine-membered enediyne. The chromoprotein appears to be less toxic than compounds belonging to ten-membered enediynes, presumably because of the activity-modulating effect of the apoprotein.

[0008] The present invention provides polypeptides and isolated nucleic acids encoding polypeptides of the chromoprotein biosynthetic gene cluster of Actinomadura sp. 21G792. Included among the polypeptides are components of the chromophore biosynthetic pathway and the pre-apoprotein. In a host, the apoprotein component is formed by cleavage of a signal peptide from the pre-apoprotein. Accordingly, the invention further provides nucleic acid sequences encoding the Actinomadura sp. 21G792 apoprotein fused at its N-terminal to a secretion signal peptide.

[0009] In an embodiment of the invention, the nucleic acid encodes a polypeptide having having at least about 70% homology with the amino acid sequence of SEQ ID NO:2, SEQ ID NO:4, SEQ ID NO:6, SEQ ID NO:8, SEQ ID NO:10, SEQ ID NO:12, SEQ ID NO:14, SEQ ID NO:16, SEQ ID NO:18, SEQ ID NO:20, SEQ ID NO:22, SEQ ID NO:24, SEQ ID NO:26, SEQ ID NO:28, SEQ ID NO:30, SEQ ID NO:32, SEQ ID NO:34, SEQ ID NO:36, SEQ ID NO:38, SEQ ID NO:40, SEQ ID NO:42, SEQ ID NO:44, SEQ ID NO:46, SEQ ID NO:48, SEQ ID NO:50, SEQ ID NO:52, SEQ ID NO:54, SEQ ID NO:56, SEQ ID NO:58, SEQ ID NO:60, SEQ ID NO:62, SEQ ID NO:64, SEQ ID NO:66, SEQ ID NO:68, SEQ ID NO:70, SEQ ID NO:72, SEQ ID NO:74, SEQ ID NO:76, SEQ ID NO:78, SEQ ID NO:80, SEQ ID NO:82, SEQ ID NO:84, SEQ ID NO:86, SEQ ID NO:88, SEQ ID NO:90, SEQ ID NO:92, SEQ ID NO:94, SEQ ID NO:96, SEQ ID NO:98, SEQ ID NO:100, SEQ ID NO:102, SEQ ID NO:104, SEQ ID NO:106, SEQ ID NO:108, SEQ ID NO:110, SEQ ID NO:112, SEQ ID NO:114, SEQ ID NO:116, SEQ ID NO:118, SEQ ID NO:120, SEQ ID NO:122, SEQ ID NO:124, SEQ ID NO:126, SEQ ID NO:128, SEQ ID NO:130, SEQ ID NO:132, SEQ ID NO:134, SEQ ID NO:136, SEQ ID NO:138, SEQ ID NO:140, SEQ ID NO:142, SEQ ID NO:144, SEQ ID NO:146, SEQ ID NO:148 or SEQ ID NO:150. In other embodiments of the invention, the homology may be at least about 80%, or at least about 90%, or the homology may be 100%. In certain embodiments, the sequence of the polypeptide is identical to one of SEQ ID NO:2, SEQ ID NO:4, SEQ ID NO:6, SEQ ID NO:8, SEQ ID NO:10, SEQ ID NO:12, SEQ ID NO:14, SEQ ID NO:16, SEQ ID NO:18, SEQ ID NO:20, SEQ ID NO:22, SEQ ID NO:24, SEQ ID NO:26, SEQ ID NO:28, SEQ ID NO:30, SEQ ID NO:32, SEQ ID NO:34, SEQ ID NO:36, SEQ ID NO:38, SEQ ID NO:40, SEQ ID NO:42, SEQ ID NO:44, SEQ ID NO:46, SEQ ID NO:48, SEQ ID NO:50, SEQ ID NO:52, SEQ ID NO:54, SEQ ID NO:56, SEQ ID NO:58, SEQ ID NO:60, SEQ ID NO:62, SEQ ID NO:64, SEQ ID NO:66, SEQ ID NO:68, SEQ ID NO:70, SEQ ID NO:72, SEQ ID NO:74, SEQ ID NO:76, SEQ ID NO:78, SEQ ID NO:80, SEQ ID NO:82, SEQ ID NO:84, SEQ ID NO:86, SEQ ID NO:88, SEQ ID NO:90, SEQ ID NO:92, SEQ ID NO:94, SEQ ID NO:96, SEQ ID NO:98, SEQ ID NO:100, SEQ ID NO:102, SEQ ID NO:104, SEQ ID NO:106, SEQ ID NO:108, SEQ ID NO:110, SEQ ID NO:112, SEQ ID NO:114, SEQ ID NO:116, SEQ ID NO:118, SEQ ID NO:120, SEQ ID NO:122, SEQ ID NO:124, SEQ ID NO:126, SEQ ID NO:128, SEQ ID NO:130, SEQ ID NO:132, SEQ ID NO:134, SEQ ID NO:136, SEQ ID NO:138, SEQ ID NO:140, SEQ ID NO:142, SEQ ID NO:144, SEQ ID NO:146, SEQ ID NO:148 or SEQ ID NO:150.

[0010] In certain embodiments, the nucleic acid comprises a nucleotide sequence that is at least about 70%, at least about 80%, at least about 90%, or identical to the sequence of SEQ ID NO:1, SEQ ID NO:3, SEQ ID NO:5, SEQ ID NO:7, SEQ ID NO:9, SEQ ID NO:11, SEQ ID NO:13, SEQ ID NO:15, SEQ ID NO:17, SEQ ID NO:19, SEQ ID NO:21, SEQ ID NO:23, SEQ ID NO:25, SEQ ID NO:27, SEQ ID NO:29, SEQ ID NO:31, SEQ ID NO:33, SEQ ID NO:35, SEQ ID NO:37, SEQ ID NO:39, SEQ ID NO:41, SEQ ID NO:43, SEQ ID NO:45, SEQ ID NO:47, SEQ ID NO:49, SEQ ID NO:51, SEQ ID NO:53, SEQ ID NO:55, SEQ ID NO:57, SEQ ID NO:59, SEQ ID NO:61, SEQ ID NO:63, SEQ ID NO:65, SEQ ID NO:67, SEQ ID NO:69, SEQ ID NO:71, SEQ ID NO:73, SEQ ID NO:75, SEQ ID NO:77, SEQ ID NO:79, SEQ ID NO:81, SEQ ID NO:83, SEQ ID NO:85, SEQ ID NO:87, SEQ ID NO:89, SEQ ID NO:91, SEQ ID NO:93, SEQ ID NO:95, SEQ ID NO:97, SEQ ID NO:99, SEQ ID NO:101, SEQ ID NO:103, SEQ ID NO:105, SEQ ID NO:107, SEQ ID NO:109, SEQ ID NO:111, SEQ ID NO:113, SEQ ID NO:115, SEQ ID NO:117, SEQ ID NO:119, SEQ ID NO:121, SEQ ID NO:123, SEQ ID NO:125, SEQ ID NO:127, SEQ ID NO:129, SEQ ID NO:131, SEQ ID NO:133, SEQ ID NO:135, SEQ ID NO:137, SEQ ID NO:139, SEQ ID NO:141, SEQ ID NO:143, SEQ ID NO:145, SEQ ID NO:147, or SEQ ID NO:149, or the complement thereof.

[0011] The invention also provides vectors and host cells comprising the nucleic acids. In one embodiment, the invention provides a cosmid containing DNA isolated from Actinomadura sp. 21G792, that contains all or part of the chromoprotein gene cluster. Methods for isolation and manipulation of the nucleic acids are provided. Also provided are probes and primers for identification and amplification of chromoprotein gene cluster nucleic acids.

[0012] The invention provides an isolated protein or polypeptide comprising an amino acid sequence having at least about 70% homology, at least about 80% homology, at least about 90% homology, or about 100% homology with the amino acid sequence of SEQ ID NO:2, SEQ ID NO:4, SEQ ID NO:6, SEQ ID NO:8, SEQ ID NO:10, SEQ ID NO:12, SEQ ID NO:14, SEQ ID NO:16, SEQ ID NO:18, SEQ ID NO:20, SEQ ID NO:22, SEQ ID NO:24, SEQ ID NO:26, SEQ ID NO:28, SEQ ID NO:30, SEQ ID NO:32, SEQ ID NO:34, SEQ ID NO:36, SEQ ID NO:38, SEQ ID NO:40, SEQ ID NO:42, SEQ ID NO:44, SEQ ID NO:46, SEQ ID NO:48, SEQ ID NO:50, SEQ ID NO:52, SEQ ID NO:54, SEQ ID NO:56, SEQ ID NO:58, SEQ ID NO:60, SEQ ID NO:62, SEQ ID NO:64, SEQ ID NO:66, SEQ ID NO:68, SEQ ID NO:70, SEQ ID NO:72, SEQ ID NO:74, SEQ ID NO:76, SEQ ID NO:78, SEQ ID NO:80, SEQ ID NO:82, SEQ ID NO:84, SEQ ID NO:86, SEQ ID NO:88, SEQ ID NO:90, SEQ ID NO:92, SEQ ID NO:94, SEQ ID NO:96, SEQ ID NO:98, SEQ ID NO:100, SEQ ID NO:102, SEQ ID NO:104, SEQ ID NO:106, SEQ ID NO:108, SEQ ID NO:100, SEQ ID NO:112, SEQ ID NO:114, SEQ ID NO:116, SEQ ID NO:118, SEQ ID NO:120, SEQ ID NO:122, SEQ ID NO:124, SEQ ID NO:126, SEQ ID NO:128, SEQ ID NO:130, SEQ ID NO:132, SEQ ID NO:134, SEQ ID NO:136, SEQ ID NO:138, SEQ ID NO:140, SEQ ID NO:142, SEQ ID NO:144, SEQ ID NO:146, SEQ ID NO:148, or SEQ ID NO:150, and variants thereof.

[0013] The present invention contemplates a method for producing a recombinant apoprotein; the method comprises the steps of: a) culturing a host cell which contains an expression vector having a nucleic acid sequence comprising SEQ ID NO:63 or SEQ ID NO:149 in a culture medium under conditions suitable for expression of the recombinant protein in the host cell, and b) isolating the recombinant protein from the host cell or the culture medium.

[0014] Also contemplated is a method of producing a recombinant chromoprotein. The method comprises: a) culturing a host cell which contains a cosmid or other expression vector which expresses genes encoding structural and enzymatic components (e.g., including all or a subset of orfs 1-65), and b) isolating the recombinant protein from the host cell or culture medium. The recombinant chromoprotein can be the 21G792 chromoprotein, or a variant thereof.

[0015] The present invention contemplates methods for using a nucleic acid molecule that hybridizes to or comprises a portion of SEQ ID NO:1, SEQ ID NO:3, SEQ ID NO:5, SEQ ID NO:7, SEQ ID NO:9, SEQ ID NO:11, SEQ ID NO:13, SEQ ID NO:15, SEQ ID NO:17, SEQ ID NO:19, SEQ ID NO:21, SEQ ID NO:23, SEQ ID NO:25, SEQ ID NO:27, SEQ ID NO:29, SEQ ID NO:31, SEQ ID NO:33, SEQ ID NO:35, SEQ ID NO:37, SEQ ID NO:39, SEQ ID NO:41, SEQ ID NO:43, SEQ ID NO:45, SEQ ID NO:47, SEQ ID NO:49, SEQ ID NO:51, SEQ ID NO:53, SEQ ID NO:55, SEQ ID NO:57, SEQ ID NO:59, SEQ ID NO:61, SEQ ID NO:63, SEQ ID NO:65, SEQ ID NO:67, SEQ ID NO:69, SEQ ID NO:71, SEQ ID NO:73, SEQ ID NO:75, SEQ ID NO:77, SEQ ID NO:79, SEQ ID NO:81, SEQ ID NO:83, SEQ ID NO:85, SEQ ID NO:87, SEQ ID NO:89, SEQ ID NO:91, SEQ ID NO:93, SEQ ID NO:95, SEQ ID NO:97, SEQ ID NO:99, SEQ ID NO:101, SEQ ID NO:103, SEQ ID NO:105, SEQ ID NO:107, SEQ ID NO:109, SEQ ID NO:111, SEQ ID NO:113, SEQ ID NO:115, SEQ ID NO:117, SEQ ID NO:119, SEQ ID NO:121, SEQ ID NO:123, SEQ ID NO:125, SEQ ID NO:127, SEQ ID NO:129, SEQ ID NO:131, SEQ ID NO:133, SEQ ID NO:135, SEQ ID NO:137, SEQ ID NO:139, SEQ ID NO:141, SEQ ID NO:143, SEQ ID NO:145, SEQ ID NO:147, or SEQ ID NO:149 as a probe to, for example, identify other organisms capable of producing enediyne-related compounds or to identify the genes involved in the synthesis of chromoproteins in, for example, organisms capable of producing enediyne related compounds, such as Actinomadura sp. 21G792.

[0016] The invention provides the Actinomadura sp. 21G792 apoprotein and provides substantially pure forms of the apoprotein and chromoprotein, as well as pharmaceutical compositions comprising the chromoprotein and methods for administering the chromoprotein. The chromoprotein is demonstrated to be useful for treatment of cancerous cells and tumors.

[0017] The present invention further provides a method for generating variants of the Actinomadura sp. 21G792 apoprotein that have altered biological activity. Such variant apoproteins can have altered chromophore binding properties, altered target specificity, or a combination thereof.

[0018] It will be understood that the present invention provides for production of large quantities of the apoprotein and the chromoprotein. It further will be appreciated that the invention may lead to the identification of other organisms capable of producing enediyne-related compounds or the identification of the genes involved in the synthesis of chromoproteins in, for example, organisms capable of producing enediyne related compounds, such as Actinomadura sp. 21G792. Additionally, it will be appreciated that the invention provides for the production of modified versions of the apoprotein which, for example, have decreased toxicity, increased potency, or increased stability. It also will be understood that manipulation of the Actinomadura sp. 21G792 apoprotein can lead to an apoprotein with altered binding specificities and, thus, the ability to function as a targeted drug delivery vehicle for chromophores different from the 21G792 enediyne chromophore. Finally, it will be appreciated that pharmaceutical compositions comprising the Actinoinadura sp. 21G792 chromoprotein can be developed and administered to mammals, preferably humans, having bacterial infections or cancerous growths.

### BRIEF DESCRIPTION OF THE DRAWINGS

[0019] FIG. 1 is an HPLC chromatogram of the Actinomadura sp. 21G792 chromoprotein. The analytical conditions of the HPLC were as follows. Column: TosoHaas DEAE 5 PW (10 um particle size, 7.5 mm×7.5 cm in size). Buffer: 0-0.5 M linear gradient NaCl with constant 0.05 M Tris-HCl in 25 min at a flow rate of 0.8 ml/min.

[0020] FIG. 2 is a UV spectrum of the Actinomadura sp. 21G792 chromoprotein.

[0021] FIG. 3 is an HPLC chromatogram of the 21G792 apoprotein. The analytical conditions of the HPLC were as follows. Column: VYDAC Protein C4 (300 A, 3.0×100 mm in size). Solvent: 10-30% Acetonitrile in H₂O with constant 0.05% TFA in 6 minutes at 2 ml/min.

[0022] FIG. 4 is a UV spectrum of the 21G792 chromoprotein.

[0023] FIG. 5 shows a molecular weight determination for the apoprotein (12.92409 kDa by MALDI-MS).

[0024] FIG. 6 provides the nucleotide sequence and deduced amino acid sequence of the 21G792 pre-apoprotein and apoprotein. The putative ribosome binding site is boxed, and the leader peptide is underlined. The slash mark indicates the cleavage site for leader peptide and apoprotein.

[0025] FIG. 7 depicts the open reading frames of Actinomadura sp. 21G792 chromoprotein gene cluster. Genes located on cosmid 41417 are indicated by a solid line above the orf arrows. Those located on cosmid 21gD are indicated by the dashed line composed of small dashes, and those located on cosmid 21gB are indicated by the dashed line composed of large dashes. Locations of probes used to identify each cosmid are indicated by black barbells. PstI (P) and EcoRI (E) restriction sites are labeled.

[0026] FIG. 8 depicts the structure of the Actinoinadura sp. 21G792 chromophore.

[0027] FIG. 9 depicts a pathway for synthesis of the tyrosine-derived component (3-[2-chloro-3-hydroxy-4-methoxy-phenyl]-3-hydroxy-propionic acid) of the Actinomadura sp. 21G792 chromophore.

[0028] FIG. 10 depicts structural domains of the orf17 gene product. Core motifs of the condensation (C), adenylation (A) and peptidyl-carrier protein (PCP) domains are boxed and labeled. Residues contributing to the A domain substrate specificity code for the orf17 gene product and SgcC4 of the C-1027 biosynthetic pathway are in bold and underlined. Identical residues are marked with an asterisk, a colon indicates conserved residues and a semi-colon indicates semi-conserved residues.

[0029] FIG. 11 depicts a pathway for synthesis of the madurosamine (4-amino-4-deoxy-3-C-methyl-β-ribopyranose) component of the Actinomadura sp. 21G792 chromophore.

[0030] FIG. 12 depicts the alignment of Orf38 with dNDP-glucose-4,6-dehydratases and UDP-glucuronate decarboxylases. Glucose-4,6-dehydratase sequences included in the alignment are Orf5 from the Streptomyces neyagawaensis concanamycin A gene cluster (AAZ94396), MtmE from the Streptomyces argillaceus mithramycin gene cluster (CAA71847), and SpcE from the Streptomyces spectabilis spectinomycin gene cluster (AAD31797). Glucuronate decarboxylase sequences included in the alignment are Uxs1 from Pisum sativum (BAB40967), Uxs3 from Arabidopsis thaliana (AAK70882), Uxs1 from Arabidopsis thaliana (AAK70880), Uxs2 from Arabidopsis thaliana (AAK70881), Uxs1 from Mus musculus (AAK85410) and Uxs1 from Cryptococcus neoformans (AAK59981). Identical residues are marked with an asterisk, a colon indicates conserved residues and a semi-colon indicates semi-conserved residues.

[0031] FIG. 13 depicts a pathway for synthesis of the 2-hydroxy-3,6-dimethyl benzoic acid component of the Actinomadura sp. 21G792 chromophore.

[0032] FIG. 14 depicts the alignment of the region between the A4 and A5 core motifs of Orf31 and ten aryl acid-AMP ligases. Structural anchors are shaded in black. Proposed constituents of the carboxy acid binding pockets are shaded in grey. Residues proposed to be involved in discrimination between the activation of DHBA and salicylic acid are identified with a number sign. Identical residues are marked with an asterisk, a colon indicates conserved residues and a semi-colon indicates semi-conserved residues.

[0033] FIG. 15 depicts a biosynthetic pathway for the generation of the enediyne core of the Actinomadura sp. 21G792 chromophore.

[0034] FIG. 16 depicts the domain organization and comparison of Orf5 with the SgcE and NcsE enediyne PKSs. aa, amino acid; KS, ketosynthase; AT, acetyltransferase; ACP, acyl carrier protein; KR, ketoreductase; DH, dehydratase; TD, terminal domain.

[0035] FIG. 17 depicts a route to assembly of the four components of the Actinomadura sp. 21G792 chromophore.

[0036] FIG. 18 is a graph demonstrating that the 21G792 chromoprotein induced dose-dependent DNA strand breaks occur in p21-proficient and p21-deficient HCT116 human colon carcinoma cells at >100 ng/ml chromoprotein concentrations.

[0037] FIG. 19 is a DNA cleavage assay showing that the 21G792 chromoprotein induced single strand breaks and double strand breaks, the reaction continued to progress over 24 hours, and DNA cleavage did not require a thiol agent.

[0038] FIG. 20 depicts digestion of Histone H1 by the Actinomadura sp. 21G792 chromoprotein and inhibition by DNA. Protease inhibitors are PMSF, Leupeptin, Aprotinin, and Pepstatin A. The apoprotein has no activity.

[0039] FIG. 21 depicts relative sensitivity of histones H1, H2A, H₂B, H3, and H4 to digestion by the Actinomadura sp. 21G792 chromoprotein. Basic proteins such as myelin basic protein, but not neutral/acidic proteins, are also susceptible to cleavage.

[0040] FIG. 22 depicts histone H1 reduction in cells treated with the Actinomadura sp. 21G792 chromoprotein, but not bleomycin or calicheamicin.

[0041] FIG. 23A is a protein immunoblot showing that exposure of HCT116 cells to the chromoprotein at various concentrations results in the activation of the p53/p21 checkpoint. FIG. 23B depicts phosphorylation of the serine-15 amino acid residue of p53 at the cleavage of poly-ADP-ribose phosphorylase (ParP).

[0042] FIGS. 24 and 25 are a series of graphs showing the in vivo potency of the 21G792 chromoprotein against tumors of subcutaneously injected LoVo (colon cancer); HCT116 (colon); HT29 (colon); LOX (melanoma); HN5 (head & neck); and PC-3 (prostate) cells in athymic (nude) mice.

[0043] FIG. 26 depicts uptake of FITC labeled Actinomadura sp. 21G792 chromoprotein by HCT116 cells.

[0044] FIG. 27 depicts uptake of FITC labeled Actinomadura sp. 21G792 chromoprotein and apoprotein by HCT116 cells.

[0045] FIG. 28 depicts uptake of labeled Actinomadura sp. 21G792 chromoprotein in the presence of a 10 fold greater concentration of unlabeled chromoprotein.

[0046] FIG. 29 depicts the effect of an energy uncoupling agent (sodium azide) or a tubulin disrupting agent (nocodazole) on uptake of the Actinomadura sp. 21G792 apoprotein by HCT116 cells.

[0047] FIG. 30 depicts linkage of a monoclonal antibody to a derivative of the Actinomadura sp. 21G792 chromophore.

### DETAILED DESCRIPTION OF THE INVENTION

[0048] Enediyne antibiotics are produced by a variety of organisms generally belonging to the order Actinomycetales, including but not limited to the genera Streptomyces, Micromonospora, and Actinomadura. The present invention relates to a novel chromoprotein produced by Actinomadura sp. 21G792, deposited at the Agricultural Research Service Culture Collection (NRRL, 1815 North University Street, Peoria, Ill., 61064). The deposits were made under the terms of the Budapest Treaty. Actinomadura sp. 21G792 has been given accession number NRRL 30778. Of such organisms known to date, Actinomadura sp. 21G792 appears to be most similar to the Actinomadura strain deposited as ATCC 39144 (U.S. Pat. No. 4,546,084). As assessed by 16S rDNA sequences, the strains are related species or subspecies.

[0049] The Actinomadura sp. 21G792 chromoprotein consists of a novel apoprotein and chromophore. Components of the chromoprotein and of the chromophore biosynthetic pathway, or precursors of those components (i.e., the pre-apoprotein), are encoded by a contiguous set of open reading frames (orfs) referred to as the chromoprotein biosynthetic gene cluster. Accordingly, the invention provides an isolated nucleic acid that encodes an orf of the Actinomadura sp. 21G792 chromoprotein biosynthetic gene cluster (See Table 1), or an expressed (i.e., processed) fragment thereof (e.g., an apoprotein; SEQ ID NO:150). In one embodiment, the invention provides a nucleic acid having a nucleotide sequence that encodes the amino acid sequence of SEQ ID NO:2, SEQ ID NO:4, SEQ ID NO:6, SEQ ID NO:8, SEQ ID NO:10, SEQ ID NO:12, SEQ ID NO:14, SEQ ID NO:16, SEQ ID NO:18, SEQ ID NO:20, SEQ ID NO:22, SEQ ID NO:24, SEQ ID NO:26, SEQ ID NO:28, SEQ ID NO:30, SEQ ID NO:32, SEQ ID NO:34, SEQ ID NO:36, SEQ ID NO:38, SEQ ID NO:40, SEQ ID NO:42, SEQ ID NO:44, SEQ ID NO:46, SEQ ID NO:48, SEQ ID NO:50, SEQ ID NO:52, SEQ ID NO:54, SEQ ID NO:56, SEQ ID NO:58, SEQ ID NO:60, SEQ ID NO:62, SEQ ID NO:64, SEQ ID NO:66, SEQ ID NO:68, SEQ ID NO:70, SEQ ID NO:72, SEQ ID NO:74, SEQ ID NO:76, SEQ ID NO:78, SEQ ID NO:80, SEQ ID NO:82, SEQ ID NO:84, SEQ ID NO:86, SEQ ID NO:88, SEQ ID NO:90, SEQ ID NO:92, SEQ ID NO:94, SEQ ID NO:96, SEQ ID NO:98, SEQ ID NO:100, SEQ ID NO:102, SEQ ID NO:104, SEQ ID NO:106, SEQ ID NO:108, SEQ ID NO:110, SEQ ID NO:112, SEQ ID NO:114, SEQ ID NO:116, SEQ ID NO:118, SEQ ID NO:120, SEQ ID NO:122, SEQ ID NO:124, SEQ ID NO:126, SEQ ID NO:128, SEQ ID NO:130, SEQ ID NO:132, SEQ ID NO:134, SEQ ID NO:136, SEQ ID NO:138, SEQ ID NO:140, SEQ ID NO:142, SEQ ID NO:144, SEQ ID NO:146, SEQ ID NO:148, or SEQ ID NO:150. In a preferred embodiment, the nucleic acids comprise the nucleotide sequence of SEQ ID NO:1, SEQ ID NO:3, SEQ ID NO:5, SEQ ID NO:7, SEQ ID NO:9, SEQ ID NO:11, SEQ ID NO:13, SEQ ID NO:15, SEQ ID NO:17, SEQ ID NO:19, SEQ ID NO:21, SEQ ID NO:23, SEQ ID NO:25, SEQ ID NO:27, SEQ ID NO:29, SEQ ID NO:31, SEQ ID NO:33, SEQ ID NO:35, SEQ ID NO:37, SEQ ID NO:39, SEQ ID NO:41, SEQ ID NO:43, SEQ ID NO:45, SEQ ID NO:47, SEQ ID NO:49, SEQ ID NO:51, SEQ ID NO:53, SEQ ID NO:55, SEQ ID NO:57, SEQ ID NO:59, SEQ ID NO:61, SEQ ID NO:63, SEQ ID NO:65, SEQ ID NO:67, SEQ ID NO:69, SEQ ID NO:71, SEQ ID NO:73, SEQ ID NO:75, SEQ ID NO:77, SEQ ID NO:79, SEQ ID NO:81, SEQ ID NO:83, SEQ ID NO:85, SEQ ID NO:87, SEQ ID NO:89, SEQ ID NO:91, SEQ ID NO:93, SEQ ID NO:95, SEQ ID NO:97, SEQ ID NO:99, SEQ ID NO:101, SEQ ID NO:103, SEQ ID NO:105, SEQ ID NO:107, SEQ ID NO:109, SEQ ID NO:111, SEQ ID NO:113, SEQ ID NO:115, SEQ ID NO:117, SEQ ID NO:119, SEQ ID NO:121, SEQ ID NO:123, SEQ ID NO:125, SEQ ID NO:127, SEQ ID NO:129, SEQ ID NO:131, SEQ ID NO:133, SEQ ID NO:135, SEQ ID NO:137, SEQ ID NO:139, SEQ ID NO:141, SEQ ID NO:143, SEQ ID NO:145, SEQ ID NO:147, or SEQ ID NO:149. It will be appreciated that the nucleic acids of the invention include complementary sequences.

TABLE 1
Open Reading Frames of the 21G792 Chromoprotein Gene Cluster

| | Start/Stop | SEQ | Length | SEQ |
|---|---|---|---|---|
| Orf | (bp) | ID NO | (aa) | ID NO |
| 9* | Start/1391 | 1 | incomplete | 2 |
| 8* | 1475/1861 | 3 | 128 | 4 |
| 7* | 1916/2371 | 5 | 151 | 6 |
| 6* | 2672/4270 | 7 | 532 | 8 |
| 5* | 4984/4349 | 9 | 211 | 10 |
| 4* | 5054/6631 | 11 | 525 | 12 |
| 3* | 6685/6891 | 13 | 68 | 14 |
| 2* | 7472/6984 | 15 | 162 | 16 |
| 1* | 8971/7475 | 17 | 498 | 18 |
| 1 | 9268/10263 | 19 | 331 | 20 |
| 2 | 10592/ | 21 | 300 | 22 |
| | 11494 | | | |
| 3 | 11498/ | 23 | 678 | 24 |
| | 13534 | | | |
| 4 | 13541/ | 25 | 330 | 26 |
| | 14533 | | | |
| 5 | 14530/ | 27 | 1944 | 28 |
| | 20364 | | | |
| 6 | 20369/ | 29 | 152 | 30 |
| | 20827 | | | |
| 7 | 20824/ | 31 | 183 | 32 |
| | 21375 | | | |
| 8 | 21372/ | 33 | 464 | 34 |
| | 22766 | | | |
| 9 | 23607/ | 35 | 251 | 36 |
| | 22852 | | | |
| 10 | 24877/ | 37 | 336 | 38 |
| | 23867 | | | |
| 11 | 25277/ | 39 | 218 | 40 |
| | 25933 | | | |
| 12 | 25930/ | 41 | 552 | 42 |
| | 27588 | | | |
| 13 | 27602/ | 43 | 365 | 44 |
| | 28699 | | | |
| 14 | 28792/ | 45 | 261 | 46 |
| | 29577 | | | |
| 15 | 29591/ | 47 | 229 | 48 |
| | 30280 | | | |
| 16 | 30631/ | 49 | 95 | 50 |
| | 30344 | | | |
| 17 | 30845/ | 51 | 1120 | 52 |
| | 34207 | | | |
| 18 | 34204/ | 53 | 537 | 54 |
| | 35817 | | | |
| 19 | 35852/ | 55 | 548 | 56 |
| | 37498 | | | |
| 20 | 37516/ | 57 | 460 | 58 |
| | 38898 | | | |
| 21 | 39250/ | 59 | 442 | 60 |
| | 40578 | | | |
| 22 | 40705/ | 61 | 525 | 62 |
| | 42282 | | | |
| 23 | 43151/ | 63 | 165 | 64 |
| | 42654 | | | |
| 24 | 43376/ | 65 | 461 | 66 |
| | 44761 | | | |
| 25 | 44805/ | 67 | 408 | 68 |
| | 46031 | | | |
| 26 | 46045/ | 69 | 381 | 70 |
| | 47190 | | | |
| 27 | 47187/ | 71 | 409 | 72 |
| | 48416 | | | |
| 28 | 49128/ | 73 | 232 | 74 |
| | 48430 | | | |
| 29 | 49328/ | 75 | 466 | 76 |
| | 50728 | | | |
| 30 | 50725/ | 77 | 285 | 78 |
| | 51582 | | | |
| 31 | 53282/ | 79 | 548 | 80 |
| | 51636 | | | |
| 32 | 58519/ | 81 | 1746 | 82 |
| | 53279 | | | |
| 33 | 59639/ | 83 | 348 | 84 |
| | 58593 | | | |
| 34 | 59897/ | 85 | 393 | 86 |
| | 61078 | | | |
| 35 | 61119/ | 87 | 148 | 88 |
| | 61565 | | | |
| 36 | 61568/ | 89 | 401 | 90 |
| | 62773 | | | |
| 37 | 62785/ | 91 | 447 | 92 |
| | 64128 | | | |
| 38 | 64131/ | 93 | 328 | 94 |
| | 65117 | | | |
| 39 | 65134/ | 95 | 539 | 96 |
| | 66753 | | | |
| 40 | 68054/ | 97 | 406 | 98 |
| | 66834 | | | |
| 41 | 68270/ | 99 | 340 | 100 |
| | 69292 | | | |
| 42 | 69375/ | 101 | 460 | 102 |
| | 70757 | | | |
| 43 | 71889/ | 103 | 347 | 104 |
| | 70846 | | | |
| 44 | 72452/ | 105 | 138 | 106 |
| | 72036 | | | |
| 45 | 72706/ | 107 | 557 | 108 |
| | 74379 | | | |
| 46 | 75114/ | 109 | 230 | 110 |
| | 74422 | | | |
| 47 | 75189/ | 111 | 403 | 112 |
| | 76400 | | | |
| 48 | 77794/ | 113 | 444 | 114 |
| | 76460 | | | |
| 49 | 78801/ | 115 | 277 | 116 |
| | 77968 | | | |
| 50 | 78892/ | 117 | 213 | 118 |
| | 79533 | | | |
| 51 | 80344/ | 119 | 266 | 120 |
| | 79544 | | | |
| 52 | 80936/ | 121 | 196 | 122 |
| | 80346 | | | |
| 53 | 81022/ | 123 | 109 | 124 |
| | 81351 | | | |
| 54 | 81348/ | 125 | 142 | 126 |
| | 81776 | | | |
| 55 | 82077/ | 127 | 292 | 128 |
| | 82955 | | | |
| 56 | 82998/ | 129 | 337 | 130 |
| | 84011 | | | |
| 57 | 84224/ | 131 | 352 | 132 |
| | 85282 | | | |
| 58 | 85643/ | 133 | 69 | 134 |
| | 85434 | | | |
| 59 | 87546/ | 135 | 592 | 136 |
| | 85768 | | | |
| 60 | 87826/ | 137 | 59 | 138 |
| | 87647 | | | |
| 61 | 87909/ | 139 | 25 | 140 |
| | 87832 | | | |
| 62 | 88485/ | 141 | 167 | 142 |
| | 87982 | | | |
| 63 | 88571/ | 143 | 259 | 144 |
| | 89350 | | | |
| 64 | 89542/ | 145 | 144 | 146 |
| | 89976 | | | |
| 65 | End [90573]/ | 147 | incomplete | 148 |
| | 89980 | | | |

*involved in primary metabolism

[0050] The invention provides nucleic acids that specifically hybridize (or specifically bind) under stringent hybridization conditions to SEQ ID NO:1, SEQ ID NO:3, SEQ ID NO:5, SEQ ID NO:7, SEQ ID NO:9, SEQ ID NO:11, SEQ ID NO:13, SEQ ID NO:15, SEQ ID NO:17, SEQ ID NO:19, SEQ ID NO:21, SEQ ID NO:23, SEQ ID NO:25, SEQ ID NO:27, SEQ ID NO:29, SEQ ID NO:31, SEQ ID NO:33, SEQ ID NO:35, SEQ ID NO:37, SEQ ID NO:39, SEQ ID NO:41, SEQ ID NO:43, SEQ ID NO:45, SEQ ID NO:47, SEQ ID NO:49, SEQ ID NO:51, SEQ D NO:53, SEQ ID NO:55, SEQ ID NO:57, SEQ ID NO:59, SEQ ID NO:61, SEQ ID NO:63, SEQ ID NO:65, SEQ ID NO:67, SEQ ID NO:69, SEQ ID NO:71, SEQ ID NO:73, SEQ ID NO:75, SEQ ID NO:77, SEQ ID NO:79, SEQ ID NO:81, SEQ ID NO:83, SEQ ID NO:85, SEQ ID NO:87, SEQ ID NO:89, SEQ ID NO:91, SEQ ID NO:93, SEQ ID NO:95, SEQ ID NO:97, SEQ ID NO:99, SEQ ID NO:101, SEQ ID NO:103, SEQ ID NO:105, SEQ ID NO:107, SEQ ID NO:109, SEQ ID NO:11, SEQ ID NO:113, SEQ ID NO:115, SEQ ID NO:117, SEQ ID NO:119, SEQ ID NO:121, SEQ ID NO:123, SEQ ID NO:125, SEQ ID NO:127, SEQ ID NO:129, SEQ ID NO:131, SEQ ID NO:133, SEQ ID NO:135, SEQ ID NO:137, SEQ ID NO:139, SEQ ID NO:141, SEQ ID NO:143, SEQ ID NO:145, SEQ ID NO:147, or SEQ ID NO:149. Also contemplated are nucleic acids that would specifically bind to the aforementioned sequences but for the degeneracy of the nucleic acid code. The nucleic acids can be of sufficient length to encode a complete protein (e.g., a complete or D or a fragment thereof. Also included are nucleic acids that encode modified proteins. Examples of protein modifications include, but are not limited to, fusions to targeting molecules such as antibodies, antibody fragments, receptor ligands and the like.

[0051] The nucleic acids further include probes and primers. In certain embodiments, the probes or primers may be degenerate. Further, in accordance with their use, probes and primers may be single or double stranded. Probes and primers include, for example, oligonucleotides that are at least about 12 nucleotides in length, preferably at least about 15 nucleotides in length, and more preferably at least about 18 nucleotides in length, and further include PCR amplification products that might be generated using primers of the invention.

[0052] Hybridization under stringent conditions refers to conditions under which a probe will hybridize preferentially to its target subsequence, and to a lesser extent to, or not at all to, other sequences. It also will be understood that stringent hybridization and stringent hybridization wash conditions in the context of nucleic acid hybridization experiments such as southern and northern hybridizations are sequence dependent, and are different under different environmental parameters. It is well known in the art to adjust hybridization and wash solution contents and temperatures such that stringent hybridization conditions are obtained. Stringency depends on such parameters as the size and nucleotide content of the probe being utilized. See Sambrook et al., 1989, Molecular Cloning—A Laboratory Manual (2nd ed.) Vol. 1-3, Cold Spring Harbor Laboratory, Cold Spring Harbor Press, NY, and other sources for general descriptions and examples. Another guide to the hybridization of nucleic acids is found in Tijssen, 1993, Laboratory Techniques in Biochemistry and Molecular Biology—Hybridization with Nucleic Acid Probes, part I, chapter 2, Overview of principles of hybridization and the strategy of nucleic acid probe assays, Elsevier, N.Y.

[0053] Preferred stringent conditions are those that allow a probe to hybridize to a sequence that is more than about 90% complementary to the probe and not to a sequence that is less than about 70% complementary. Generally, highly stringent hybridization and wash conditions are selected to be about 5° C. lower than the thermal melting point (Tₘ) for the specific sequence at a defined ionic strength and pH. The Tₘ is the temperature (under defined ionic strength and pH) at which 50% of the target sequence hybridizes to a perfectly matched probe. Very stringent conditions are selected to be equal to the Tₘ for a particular probe.

[0054] An example of stringent hybridization conditions for hybridization of complementary nucleic acids which have more than 100 complementary residues on a filter in a Southern or northern blot is 50% formamide with 1 mg of heparin at 42° C., with the hybridization being carried out overnight. An example of highly stringent wash conditions is 0.15 M NaCl at 72° C. for about 15 minutes. An example of stringent wash conditions is a 0.2 times SSC wash at 65° C. for 15 minutes (see, Sambrook et al., 1989). Often, a high stringency wash is preceded by a low stringency wash to remove background probe signal. An example of a medium stringency wash for a duplex of, e.g., more than 100 nucleotides, is 1 times SSC at 45° C. for 15 minutes. An example of a low stringency wash for a duplex of, e.g., more than 100 nucleotides, is 4-6 times SSC at 40° C. for 15 minutes. In general, a signal to noise ratio that is two times (or higher) that observed for an unrelated probe in the particular hybridization assay indicates detection of a specific hybridization.

[0055] Nucleic acids which do not hybridize to each other under stringent conditions are still substantially identical if the polypeptides which they encode are substantially identical. This occurs, e.g., when a copy of a nucleic acid is created using the maximum codon degeneracy permitted by the genetic code. Accordingly, nucleotide sequences of the invention include sequences of nucleotides that are at least about 70%, preferably at least about 80%, and more preferably at least about 90% identical to SEQ ID NO:1, SEQ ID NO:3, SEQ ID NO:5, SEQ ID NO:7, SEQ ID NO:9, SEQ ID NO:11, SEQ ID NO:13, SEQ ID NO:15, SEQ ID NO:17, SEQ ID NO:19, SEQ ID NO:21, SEQ ID NO:23, SEQ ID NO:25, SEQ ID NO:27, SEQ ID NO:29, SEQ ID NO:31, SEQ ID NO:33, SEQ ID NO:35, SEQ ID NO:37, SEQ ID NO:39, SEQ ID NO:41, SEQ ID NO:43, SEQ ID NO:45, SEQ ID NO:47, SEQ ID NO:49, SEQ ID NO:51, SEQ ID NO:53, SEQ ID NO:55, SEQ ID NO:57, SEQ ID NO:59, SEQ ID NO:61, SEQ ID NO:63, SEQ ID NO:65, SEQ ID NO:67, SEQ ID NO:69, SEQ ID NO:71, SEQ ID NO:73, SEQ ID NO:75, SEQ ID NO:77, SEQ ID NO:79, SEQ ID NO:81, SEQ ID NO:83, SEQ ID NO:85, SEQ ID NO:87, SEQ ID NO:89, SEQ ID NO:91, SEQ ID NO:93, SEQ ID NO:95, SEQ ID NO:97, SEQ ID NO:99, SEQ ID NO:101, SEQ ID NO:103, SEQ ID NO:105, SEQ ID NO:107, SEQ ID NO:109, SEQ ID NO:111, SEQ ID NO:113, SEQ ID NO:115, SEQ ID NO:117, SEQ ID NO:119, SEQ ID NO:121, SEQ ID NO:123, SEQ ID NO:125, SEQ ID NO:127, SEQ ID NO:129, SEQ ID NO:131, SEQ ID NO:133, SEQ ID NO:135, SEQ ID NO:137, SEQ ID NO:139, SEQ ID NO:141, SEQ ID NO:143, SEQ ID NO:145, SEQ ID NO:147, or SEQ ID NO:149 or fragments thereof that are at least about 50 nucleotides, more preferably at least about 100 nucleotides in length.

[0056] The present invention is also directed to methods of producing one or more proteins encoded by the chromophore gene cluster. Such proteins may be produced by expressing one or more nucleic acids comprising SEQ ID NO:1, SEQ ID NO:3, SEQ ID NO:5, SEQ ID NO:7, SEQ ID NO:9, SEQ ID NO:11, SEQ ID NO:13, SEQ ID NO:15, SEQ ID NO:17, SEQ ID NO:19, SEQ ID NO:21, SEQ ID NO:23, SEQ ID NO:25, SEQ ID NO:27, SEQ ID NO:29, SEQ ID NO:31, SEQ ID NO:33, SEQ ID NO:35, SEQ ID NO:37, SEQ ID NO:39, SEQ ID NO:41, SEQ ID NO:43, SEQ ID NO:45, SEQ ID NO:47, SEQ ID NO:49, SEQ ID NO:51, SEQ ID NO:53, SEQ ID NO:55, SEQ ID NO:57, SEQ ID NO:59, SEQ ID NO:61, SEQ ID NO:63, SEQ ID NO:65, SEQ ID NO:67, SEQ ID NO:69, SEQ ID NO:71, SEQ ID NO:73, SEQ ID NO:75, SEQ ID NO:77, SEQ ID NO:79, SEQ ID NO:81, SEQ ID NO:83, SEQ ID NO:85, SEQ ID NO:87, SEQ ID NO:89, SEQ ID NO:91, SEQ ID NO:93, SEQ ID NO:95, SEQ ID NO:97, SEQ ID NO:99, SEQ ID NO:101, SEQ ID NO:103, SEQ ID NO:105, SEQ ID NO:107, SEQ ID NO:109, SEQ ID NO:111, SEQ ID NO:113, SEQ ID NO:115, SEQ ID NO:117, SEQ ID NO:119, SEQ ID NO:121, SEQ ID NO:123, SEQ ID NO:125, SEQ D NO:127, SEQ ID NO:129, SEQ ID NO:131, SEQ ID NO:133, SEQ ID NO:135, SEQ ID NO:137, SEQ ID NO:139, SEQ ID NO:141, SEQ ID NO:143, SEQ ID NO:145, SEQ ID NO:147, or SEQ ID NO:149 in a host cell. For example, one or more of the aforementioned nucleic acids can be operably linked to regulatory control nucleic acids to affect expression, and incorporated into a vector for expression in a host cell. In one embodiment of the invention, the apoprotein or the pre-apoprotein is produced.

[0057] Control elements useful in the present invention include promoters, optionally containing operator sequences and ribosome binding sites. Other regulatory sequences may also be desirable, such as those which allow for regulation of expression of apoprotein or pre-apoprotein relative to the growth of the host cell. Regulatory sequences are known to those of skill in the art, and examples include those which cause the expression of a gene to be turned on or off in response to a chemical or physical stimulus, including the presence of a regulatory compound. Other types of regulatory elements may also be present in the vector, for example, enhancer sequences. Various expression vectors are known in the art, e.g., cosmids, Pls, YACs, BACs, PACs, HACs.

[0058] Selectable markers can also be included in the recombinant expression vectors. A variety of markers are known which are useful in selecting for transformed cell lines and generally comprise a gene whose expression confers a selectable phenotype on transformed cells when the cells are grown in an appropriate selective medium. Such markers include, for example, genes that confer antibiotic resistance or sensitivity to the plasmid.

[0059] The vectors described above can be inserted in any prokaryotic or eukaryotic cell suitable for protein expression. Host cells include, but are not limited to Actinomadura, Streptomyces, Micrononospora, Actinomyces, Nonomurea, Pseudomonas, and the like. Preferred host cells are those of species or strains (e.g. bacterial strains) that naturally express enediynes such as Actinomadura, Streptomyces, and Micromonospora. (See, e.g., Pfeifer et al., 2001, Science 291, 1790-2; Martinez et al., 2004, Appl. Environ. Microbiol. 70, 2452-63) In one embodiment, the proteins are expressed in E. coli. Recovery of the expression products can be accomplished according to standard methods well known to those of skill in the art. Thus, for example, the proteins can be expressed with a convenient tag to facilitate isolation (e.g., a His₆ tag). Other standard protein purification techniques are suitable and well known to those of skill in the art (see, e.g., Quadri et al., 1998, Biochemistry 37, 1585-95; Nakano et al., 1992, Mol. Gen. Genet. 232, 313-21). When the entire chromoprotein gene cluster is expressed, the chromoprotein can be recovered. By selecting certain orfs for expression, chromoprotein related compounds can be produced. For example, the pre-apoprotein can be produced by expression of orf23.

[0060] One may also use a nucleic acid molecule comprising SEQ ID NO:1, SEQ ID NO:3, SEQ ID NO:5, SEQ ID NO:7, SEQ ID NO:9, SEQ ID NO:11, SEQ ID NO:13, SEQ ID NO:15, SEQ ID NO:17, SEQ ID NO:19, SEQ ID NO:21, SEQ ID NO:23, SEQ ID NO:25, SEQ ID NO:27, SEQ ID NO:29, SEQ ID NO:31, SEQ ID NO:33, SEQ ID NO:35, SEQ ID NO:37, SEQ ID NO:39, SEQ ID NO:41, SEQ ID NO:43, SEQ ID NO:45, SEQ ID NO:47, SEQ ID NO:49, SEQ ID NO:51, SEQ ID NO:53, SEQ ID NO:55, SEQ ID NO:57, SEQ ID NO:59, SEQ ID NO:61, SEQ ID NO:63, SEQ ID NO:65, SEQ ID NO:67, SEQ ID NO:69, SEQ ID NO:71, SEQ ID NO:73, SEQ ID NO:75, SEQ ID NO:77, SEQ ID NO:79, SEQ ID NO:81, SEQ ID NO:83, SEQ ID NO:85, SEQ ID NO:87, SEQ ID NO:89, SEQ ID NO:91, SEQ ID NO:93, SEQ ID NO:95, SEQ ID NO:97, SEQ ID NO:99, SEQ ID NO:101, SEQ ID NO:103, SEQ ID NO:105, SEQ ID NO:107, SEQ ID NO:109, SEQ ID NO:111, SEQ ID NO:113, SEQ ID NO:115, SEQ ID NO:117, SEQ ID NO:119, SEQ ID NO:121, SEQ ID NO:123, SEQ ID NO:125, SEQ ID NO:127, SEQ ID NO:129, SEQ ID NO:131, SEQ ID NO:133, SEQ ID NO:135, SEQ ID NO:137, SEQ ID NO:139, SEQ ID NO:141, SEQ ID NO:143, SEQ ID NO:145, SEQ ID NO:147, or SEQ ID NO:149, or a fragment thereof as a probe. Such probes are useful to identify nucleic acids of the invention. One may use the nucleotide sequences as a probe by any suitable method, including a method similar to that described in the Examples below. As described herein, a dNDP-glucose-4,6-dehydratase (DH) probe was used to identify cosmid clones of Actinomadura sp. 21G792 genomic DNA that might contain a gene or gene cluster encoding an apoprotein or other chromophore related proteins. Similarly, the nucleic acids of the invention can be used to identify orfs encoding apoproteins and chromophore related proteins, particularly nine-membered ring enediyne chromophores, in other organisms. Such organisms generally include organisms that produce secondary metabolites, such as, for example, fungi, bacillus, pseudomonads, myxobacteria and cyanobacteria. Preferably, the nucleic acids are used to identify genes of an organism of the order Actinomycetales (Taxonomic Outline of the Procaryotic Genera: Bergey's Manual® of Systematic Bacteriology, 2^{nd} Edition) including but not limited to an organism of the genus Actinomyces, Streptomyces or Micromonospora. More preferably, the nucleic acids are used to identify genes of species and subspecies of Actinomadura.

[0061] The present invention also provides substantially pure proteins and polypeptides. The term “substantially pure” as used herein in reference to a given polypeptide means that the polypeptide is substantially free from other biological macromolecules. For example, the substantially pure polypeptide is at least 75%, 80%, 85%, 95%, or 99% pure by dry weight. Purity can be measured by any appropriate standard method known in the art, for example, by column chromatography, polyacrylamide gel electrophoresis, or HPLC analysis. It will be appreciated that substantially pure proteins include chromoproteins, wherein an apoprotein is complexed with an enediyne molecule. Such attachment can be, for example, by a covalent or non-covalent bond, e.g., a hydrogen bond.

[0062] Proteins and polypeptides of the invention include those encoded by the orfs of the chromoprotein gene cluster of Actinomadura sp. 21G792. In preferred embodiments, the proteins and polypeptides are those comprising SEQ ID NO:2, SEQ ID NO:4, SEQ ID NO:6, SEQ ID NO:8, SEQ ID NO:10, SEQ ID NO:12, SEQ ID NO:14, SEQ ID NO:16, SEQ ID NO:18, SEQ ID NO:20, SEQ ID NO:22, SEQ ID NO:24, SEQ ID NO:26, SEQ ID NO:28, SEQ ID NO:30, SEQ ID NO:32, SEQ ID NO:34, SEQ ID NO:36, SEQ ID NO:38, SEQ ID NO:40, SEQ ID NO:42, SEQ ID NO:44, SEQ ID NO:46, SEQ ID NO:48, SEQ ID NO:50, SEQ ID NO:52, SEQ ID NO:54, SEQ ID NO:56, SEQ ID NO:58, SEQ ID NO:60, SEQ ID NO:62, SEQ ID NO:64, SEQ ID NO:66, SEQ ID NO:68, SEQ ID NO:70, SEQ ID NO:72, SEQ ID NO:74, SEQ ID NO:76, SEQ ID NO:78, SEQ ID NO:80, SEQ ID NO:82, SEQ ID NO:84, SEQ ID NO:86, SEQ ID NO:88, SEQ ID NO:90, SEQ ID NO:92, SEQ ID NO:94, SEQ ID NO:96, SEQ ID NO:98, SEQ ID NO:100, SEQ ID NO:102, SEQ ID NO:104, SEQ ID NO:106, SEQ ID NO:108, SEQ ID NO:110, SEQ ID NO:112, SEQ ID NO:114, SEQ ID NO:116, SEQ ID NO:118, SEQ ID NO:120, SEQ ID NO:122, SEQ ID NO:124, SEQ ID NO:126, SEQ ID NO:128, SEQ ID NO:130, SEQ ID NO:132, SEQ ID NO:134, SEQ ID NO:136, SEQ ID NO:138, SEQ ID NO:140, SEQ ID NO:142, SEQ ID NO:144, SEQ ID NO:146, SEQ ID NO:148, or SEQ ID NO:150. In a particular preferred embodiment, the protein is the 21G792 pre-apoprotein (SEQ ID NO:64) or apoprotein (SEQ ID NO:150) (FIG. 6). Amino acid compositions of the 21G792 pre-apoprotein and apoprotein are provided in Table 2.

TABLE 2
Amino Acid Composition of the
Actinomadura sp. 21G792 Apoprotein

| Amino Acid | Number | Composition (%) |
|---|---|---|
| Asp | 8 | 6.02 |
| Asn | 4 | 3.01 |
| Thr | 23 | 17.29 |
| Ser | 9 | 6.77 |
| Glu | 5 | 3.76 |
| Gln | 6 | 4.51 |
| Pro | 8 | 6.02 |
| Gly | 16 | 12.03 |
| Ala | 17 | 12.78 |
| Val | 21 | 15.79 |
| Cys | 2 | 1.50 |
| Met | 2 | 1.50 |
| Ile | 5 | 3.76 |
| Leu | 2 | 1.50 |
| Tyr | 2 | 1.50 |
| Phe | 3 | 2.26 |

[0063] It will also be appreciated that proteins or polypeptides of the invention further include those having substantially the same amino acid sequence as the aforementioned preferred proteins and polypeptides. Substantially the same amino acid sequence is defined herein as a sequence with at least about 70%, preferably at least about 80%, and more preferably at least about 90% homology, as determined by the FASTA search method in accordance with Pearson and Lipman, 1988, Proc. Natl. Acad. Sci. USA 85, 2444-8, including sequences that are at least about 70%, preferably at least about 80%, and more preferably at least about 90% identical, to SEQ ID NO:2, SEQ ID NO:4, SEQ ID NO:6, SEQ ID NO:8, SEQ ID NO:10, SEQ ID NO:12, SEQ ID NO:14, SEQ ID NO:16, SEQ ID NO:18, SEQ ID NO:20, SEQ ID NO:22, SEQ ID NO:24, SEQ ID NO:26, SEQ ID NO:28, SEQ ID NO:30, SEQ ID NO:32, SEQ ID NO:34, SEQ ID NO:36, SEQ ID NO:38, SEQ ID NO:40, SEQ ID NO:42, SEQ ID NO:44, SEQ ID NO:46, SEQ ID NO:48, SEQ ID NO:50, SEQ ID NO:52, SEQ ID NO:54, SEQ ID NO:56, SEQ ID NO:58, SEQ ID NO:60, SEQ ID NO:62, SEQ ID NO:64, SEQ ID NO:66, SEQ ID NO:68, SEQ ID NO:70, SEQ ID NO:72, SEQ ID NO:74, SEQ ID NO:76, SEQ ID NO:78, SEQ ID NO:80, SEQ ID NO:82, SEQ ID NO:84, SEQ ID NO:86, SEQ ID NO:88, SEQ ID NO:90, SEQ ID NO:92, SEQ ID NO:94, SEQ ID NO:96, SEQ ID NO:98, SEQ ID NO:100, SEQ ID NO:102, SEQ ID NO:104, SEQ ID NO:106, SEQ ID NO:108, SEQ ID NO:110, SEQ ID NO:112, SEQ ID NO:114, SEQ ID NO:116, SEQ ID NO:118, SEQ ID NO:120, SEQ ID NO:122, SEQ ID NO:124, SEQ ID NO:126, SEQ ID NO:128, SEQ ID NO:130, SEQ ID NO:132, SEQ ID NO:134, SEQ ID NO:136, SEQ ID NO:138, SEQ ID NO:140, SEQ ID NO:142, SEQ ID NO:144, SEQ ID NO:146, SEQ ID NO:148, or SEQ ID NO:150.

[0064] Such proteins have similar activities to those of Actinomadura sp. 21G792, particularly where there are conservative amino acid substitutions. A conservative amino acid substitution is defined as a change in the amino acid composition by way of changing one or more amino acids of a peptide, polypeptide or protein, or fragment thereof. The substitution is of amino acids with generally similar properties (e.g., acidic, basic, aromatic, size, positively or negatively charged, polarity, non-polarity) such that the substitutions do not substantially alter relevant peptide, polypeptide or protein characteristics (e.g., charge, isoelectric point, affinity, avidity, conformation, solubility) or activity. Typical conservative substitutions are selected within groups of amino acids, which groups include, but are not limited to:

(1) hydrophobic: methionine (M), alanine (A), valine (V), leucine (L), isoleucine (I);
(2) hydrophilic: cysteine (C), serine (S), threonine (T), asparagine (N), glutamine (Q);
(3) acidic: aspartic acid (D), glutamic acid (E);
(4) basic: histidine (H), lysine (K), arginine (R);
(5) aromatic: phenylalanine (F), tyrosine (Y) and tryptophan (W);
(6) residues that influence chain orientation: gly, pro.
Accordingly, the present invention also embraces apoproteins and polypeptides having similar amino acid compositions to the 21G792 apoprotein, wherein the amino acid sequences are substantially the same as SEQ ID NO:64 or SEQ ID NO:150, particularly where amino acid substitutions are conservative.

[0065] The proteins and polypeptides of the present invention can be isolated by any suitable method. For example, as stated above, when nucleotides encoding the apoprotein or pre-apoprotein are expressed in a host cell, the proteins can be expressed with an amino or carboxy terminus tag to facilitate isolation. Further, to isolate the polypeptides of the present invention from an actinomycete, especially where it is desired to isolate the apoprotein in a complex with an enediyne, one may follow a procedure similar to those described in the Examples below.

[0066] In an embodiment of the invention, the apoprotein is complexed with a chromophore. A preferred chromophore is that produced by Actinomadura sp. 21G792. The Actinomadura sp. 21G792 chromophore structure (FIG. 8) was deduced from the structure of a decomposed product that was generated by exposing the 21G792 chromoprotein to an organic solvent, and is related to the maduropeptin chromophore (see, Schroeder et al., 1994, J. Am. Chem. Soc. 116:9351; Zein, N. et al, 1995, Biochemistry 34, 11591-7).

[0067] The invention also provides methods for fermenting and cultivating Actinoinadura sp. 21G792. Cultivation of Actinomadura sp. 21G792 may be carried out in a wide variety of liquid culture media. Media which are useful for the production of the Actinomadura sp. 21G792 chromoprotein include an assimilable source of carbon, such as dextrin, sucrose, molasses, glycerol, etc.; an assimilable source of nitrogen, such as protein, protein hydrolysate, polypeptides, amino acids, corn steep liquor, etc.; and inorganic anions and cations, such as potassium, sodium, ammonium, calcium, sulfate, carbonate, phosphate, chloride, etc. Trace elements such as boron, molybdenum, copper, etc., are supplied as impurities of other constituents of the media.

[0068] The invention provides for changes to one or more orfs of the Actinomadura sp. 21G792 chromoprotein gene cluster, for example, by introduction of one or more random or targeted mutations, deletions, or insertions. In this manner, the chromophore, the apoprotein, or both may be modified in order to create a chromoprotein that exhibits, for example, decreased toxicity, increased potency, or increased stability. It is recognized that certain enediyne chromophores cleave DNA at sites specific to the chromophore. Further, various chromoproteins possess unique proteolytic activities towards histones. Accordingly, manipulation of the Actinomadura sp. 21G792 apoprotein and/or chromophore can also provide a chromoprotein with altered specificity. Alternatively, the apoprotein can be modified to serve as a carrier or delivery vehicle for an active molecule of choice. The invention also provides for a modified Actinomadura sp. 21G792 chromophore or apoprotein/chromophore complex that can be linked to another biological molecule. In one embodiment, the biological molecule provides for specific targeting of chromophore or chromoprotein. Such a biological molecule can be, for example, an antibody or other ligand for a cell surface molecule or receptor.

[0069] For example, a nucleic acid encoding an altered Actinomadura sp. 21G792 apoprotein can be inserted into an expression vector and into a host cell, the host cell cultured under conditions suitable for expression of the apoprotein, and the apoprotein recovered from the host cell or culture medium. Preferably, the host cell is capable of producing an enediyne chromophore or other molecule that can form a complex with the altered apoprotein. Examples of such cells include a variety of antibiotic producing organisms of the order Actinomycetales, particularly enediyne producing organisms such as Actinomadura and Streptomyces. Host cells further include common hosts such as E. coli and yeast. Of course, the altered apoprotein can be expressed in Actinomadura sp. 21G792. In one embodiment, the altered apoprotein will be over-expressed in the host cell. If any other endogenous apoprotein is present in the host cell, the altered apoprotein will be expressed at a higher level, the other apoprotein will be under-expressed, or the altered apoprotein will be expressed with a tag to facilitate such purification. In a preferred embodiment, the nucleic acid encoding the altered apoprotein is substituted for the endogenous apoprotein gene by homologous recombination. As such, the altered apoprotein can then be isolated in a complex with an enediyne or other molecule, e.g., an active agent, and then such a complex can be screened, e.g., against a cancer cell line, to determine bioactivity.

[0070] In yet another embodiment, a) the altered apoprotein is expressed in the host cell and is recovered without being complexed to an enediyne or other molecule, b) the altered apoprotein is then subjected to various enediyne or other molecules, c) an acceptable technique is used to determine whether the apoprotein forms a complex with the enediyne or other molecules, and optionally d) the complex is screened for bioactivity. In yet another embodiment, the altered apoprotein is expressed in the host cell and is recovered without being complexed to an enediyne or other molecule, the altered apoprotein is then subjected to various enediyne or other molecules, and the complex is screened for bioactivity.

[0071] In another example, nucleic acids encoding a modified chromophore biosynthetic pathway are expressed.

[0072] Functions of polypeptides expressed from the Actinomadura sp. 21G792 biosynthetic cluster may be deduced by comparing ORF sequences with known proteins and sequence motifs. (Table 3)

TABLE 3
Deduced functions for the Orfs of the 21G792 Chromoprotein Gene Cluster

| | | | Access. No.^{c}, | |
|---|---|---|---|---|
| ORF | Size^{a} | Similar Protein | (% id./% sim.) | Proposed Function |
| Orf9* | 462^{b} | ATP synthase beta subunit, AtpD, Nonomuraea sp. | AAU08241, n/a | primary metabolism |
| | | ATCC 39727 | | |
| Orf8* | 128 | ATP synthase epsilon chain, AtpC, Nonomuraea | AAU08242, 57/73 | primary metabolism |
| | | sp. ATCC 39727 | | |
| Orf7* | 151 | putative membrane protein, Streptomyces | BAC70590, 44/57 | primary metabolism |
| | | avermitilis MA-4680 | | |
| Orf6* | 532 | probable aminopeptidase, Thermobifida fusca YX | AAZ56436, 45/61 | primary metabolism |
| Orf5* | 211 | cobalamin adenosyltransferase, Thermobifida fusca | AAZ56437, 65/77 | primary metabolism |
| | | YX | | |
| Orf4* | 525 | GMC oxidoreductase, Deinococcus radiodurans R1 | AAF10542, 49/60 | primary metabolism |
| Orf3* | 68 | hypothetical protein, Oryza sativa | BAD81225, 41/52 | primary metabolism |
| Orf2* | 162 | acetyltransferases, Haemophilus somnus 2336 | ZP_00132424, 42/55 | primary metabolism |
| Orf1* | 498 | aldehyde dehydrogenase, Nocardioides sp. JS614 | ZP_00657819, 57/73 | primary metabolism |
| Orf1 | 331 | unknown, NcsE2, Streptomyces carzinostaticus | AAM78016, 62/69 | unknown |
| Orf2 | 300 | unknown, MadE3, Actinomadura madurae | AAQ17107, 100/100 | unknown |
| Orf3 | 678 | unknown, MadE4, Actinomadura madurae | AAQ17108, 99/99 | unknown |
| Orf4 | 330 | unknown, MadE5, Actinomadura madurae | AAQ17109, 100/100 | unknown |
| Orf5 | 1944 | Type I PKS, MadE, Actinomadura madurae | AAQ17110, 99/99 | Iterative type I PKS: KS, |
| | | | | AT, ACP, DH, KR, TD |
| Orf6 | 152 | putative thioesterase, MadE10, Actinomadura | AAQ17111, 100/100 | thioesterase |
| | | madurae | | |
| Orf7 | 183 | putative oxidoreductase, MadE6, Actinomadura | AAQ17112, 100/100 | oxidoreductase |
| | | madurae | | |
| Orf8 | 464 | putative P450 hydroxylase, MadE7, Actinomadura | AAQ17113, 99/99 | P450 hydroxylase |
| | | madurae | | |
| Orf9 | 251 | transcriptional regulator, NcsR5, Streptomyces | AAM78008, 52/65 | AraC family, |
| | | carzinostaticus | | transcriptional regulator |
| Orf10 | 336 | transcriptional regulator protein, KasT, | BAC53615, 49/63 | StrR-like transcriptional |
| | | Streptomyces kasugaensis | | regulator |
| Orf11 | 218 | putative regulatory protein, SgcR1, Streptomyces | AAL06694, 58/72 | unknown |
| | | globisporus | | |
| Orf12 | 552 | oxidoreductase, NcsE9, Streptomyces | AAM78005, 79/87 | oxidoreductase |
| | | carzinostaticus | | |
| Orf13 | 365 | unknown, SgcM, Streptomyces globisporus | AAL06686, 46/52 | unknown |
| Orf14 | 261 | unknown, NcsE11, Streptomyces carzinostaticus | AAM78004, 61/73 | unknown |
| Orf15 | 229 | O-methyltransferase, Frankia sp. EAN1pec | ZP_00573484, 49/67 | O-methyltransferase |
| Orf16 | 95 | NRPS PCP-domain, NRPS7-5, Streptomyces | BAB69396, 41/53 | aryl carrier protein |
| | | avermitilis MA-4680 | | |
| Orf17 | 1120 | type II NRPS A domain, SgcC1, Streptomyces | AAL06681, 41/49 | NRPS: C, A, PCP |
| | | globisporus | | |
| Orf18 | 537 | aminomutase, SgcC4, Streptomyces globisporus | AAL06680, 73/84 | aminomutase |
| Orf19 | 548 | putative halogenase, Frankia sp. Ccl3 | ZP_00548729, 62/75 | halogenase |
| Orf20 | 460 | type II NRPS C domain, SgcC5, Streptomyces | AAL06678, 46/59 | type II NRPS C domain |
| | | globisporus | | |
| Orf21 | 442 | squalene monooxygenase-like protein, SgcD2, | AAL06669, 50/56 | monooxygenase |
| | | Streptomyces globisporus | | |
| Orf22 | 525 | transmembrane efflux protein, SgcB, Streptomyces | AAF13999, 48/67 | transmembrane efflux |
| | | globisporus | | protein |
| Orf23 | 165 | hypothetical protein, Streptomyces avermitilis MA- | BAC71199, 33/44 | pre-apoprotein |
| | | 4680 | | |
| Orf24 | 461 | adenosylmethionine-8-amino-7-oxononanoate | BAD39928, 43/58 | aminotransferase |
| | | aminotransferase, Symbiobacterium thermophilum | | |
| Orf25 | 408 | P450 hydroxylase, Cyp28, Streptomyces avermitilis | BAC75180, 45/59 | P450 hydroxylase |
| | | MA-4680 | | |
| Orf26 | 381 | hypothetical protein, Streptomyces coelicolor A3(2) | CAC22728, 33/46 | unknown |
| Orf27 | 409 | putative cytochrome P450 oxidoreductase, | AAC25766, 45/60 | P450 oxidoreductase |
| | | Streptomyces lividans 1326 | | |
| Orf28 | 232 | conserved hypothetical protein, Bacillus clausii | AD63964, 51/71 | unknown |
| | | KSM-K16 | | |
| Orf29 | 466 | glycosyltransferase, SgcA6, Streptomyces | AAL06670, 43/57 | glycosyltransferase |
| | | globisporus | | |
| Orf30 | 285 | putative hydrolase, Streptomyces avermitilis MA- | BAC69810, 39/52 | epoxide hydrolase |
| | | 4680 | | |
| Orf31 | 548 | putative salicyl-AMP ligase, SdgA, Streptomyces | BAC78380, 54/64 | aryl acid-AMP ligase |
| | | sp. WA46 | | |
| Orf32 | 1746 | type I PKS, NcsB, Streptomyces carzinostaticus | AAM77986, 47/59 | iterative type I PKS: KS, |
| | | | | AT, DH, KR, ACP |
| Orf33 | 348 | O-methyltransferase, Trichodesmium erythraeum | ZP_00671263, 35/55 | C-methyltransferase |
| Orf34 | 393 | oxidoreductase, SgcL, Streptomyces globisporus | AAB13590, 67/78 | oxidoreductase |
| Orf35 | 148 | unknown, SgcT, Streptomyces globisporus | AAL06676, 61/76 | unknown |
| Orf36 | 401 | probable aminotransferase, SpnR, | AAG23279, 55/68 | aminotransferase |
| | | Saccharopolyspora spinosa | | |
| Orf37 | 447 | UDP-glucose dehydrogenase CalS8, | AAM70332, 52/63 | NDP-glucose |
| | | Micromonospora echinospora | | dehydrogenase |
| Orf38 | 328 | CalS9, Micromonospora echinospora | AAM70333, 61/71 | NDP-glucuronate |
| | | | | decarboxylase |
| Orf39 | 539 | chlorophenol-4-monooxygenase, SgcC, | AAL06674, 73/82 | aromatic ring hydroxylase |
| | | Streptomyces globisporus | | |
| Orf40 | 406 | putative C-3 methyl transferase, DvaC, | CAC48364, 58/74 | C-methyltransferase |
| | | Amycolatopsis balhimycina | | |
| Orf41 | 340 | alcohol dehydrogenase, Agrobacterium | AAK90613, 55/71 | alcohol dehydrogenase |
| | | tumefaciens str. C58 | | |
| Orf42 | 460 | squalene monooxygenase-like protein, SgcD2, | AAL06669, 60/72 | monooxygenase |
| | | Streptomyces globisporus | | |
| Orf43 | 347 | NDP-1-glucose synthase, med-ORF18, | BAC79029, 55/71 | dNDP-glucose synthase |
| | | Streptomyces sp. AM-7161 | | |
| Orf44 | 138 | putative lyase, Streptomyces coelicolor A3(2) | CAC37263, 47/61 | lyase |
| Orf45 | 557 | putative methylmalonyl-CoA decarboxylase alpha | BAC70414, 66/79 | carboxylyase/carboxyl |
| | | subunit, MmdA2, Streptomyces avermitilis MA-4680 | | transferase, lipid |
| | | | | metabolism |
| Orf46 | 230 | possible trancriptional regulator, Mycobacterium | CAD93534, 37/50 | TetR family, |
| | | bovix | | transcriptional regulator |
| Orf47 | 403 | retinal pigment epithelial membrane protein, | ZP_00577676, 31/40 | dioxygenase |
| | | Sphingopyxis alaskensis RB2256 | | |
| Orf48 | 444 | putative dioxygenase, SimC5, Streptomyces | AAK06796, 43/53 | dioxygenase |
| | | antibioticus | | |
| Orf49 | 277 | conserved hypothetical protein, Thermobifida fusca | AAZ55273, 51/64 | dNDP-sugar epimerase |
| | | YX | | |
| Orf50 | 213 | transcriptional regulatory protein, Bradyrhizobium | BAC49474, 45/60 | TetR family, |
| | | japonicum | | transcriptional regulator |
| Orf51 | 266 | putative membrane protein, Streptomyces | CAB61706, 52/66 | unknown |
| | | coelicolor A3(2) | | |
| Orf52 | 196 | putative TetR-family transcriptional regulator, | CAB71239, 30/47 | TetR family, |
| | | Streptomyces coelicolor A3(2) | | transcriptional regulator |
| Orf53 | 109 | transcriptional regulator, Mesorhizobium loti | BAB53793, 50/70 | ArsR family, |
| | | | | transcriptional regulator |
| Orf54 | 142 | conserved hypothetical protein, Ralstonia | CAD17332, 49/58 | unknown |
| | | solanacearum | | |
| Orf55 | 292 | LysR family regulatory protein, Frankia sp. | ZP_00571435, 43/54 | LysR family, |
| | | EAN1pec | | transcriptional regulator |
| Orf56 | 337 | class A beta-lactamase, Bla, Nocardia asteroides | AAG44836, 46/58 | unknown |
| Orf57 | 352 | hypothetical protein, Syntrophobacter fumaroxidans | ZP_00667098, 26/40 | unknown |
| Orf58 | 69 | none | — | unknown |
| Orf59 | 592 | RNA-directed DNA polymerase, Frankia sp. | ZP_00570947, 70/80 | unknown |
| | | EAN1pec | | |
| Orf60 | 59 | none | — | unknown |
| Orf61 | 25 | none | — | unknown |
| Orf62 | 167 | putative regulatory protein, Streptomyces coelicolor | CAC44216, 40/47 | regulator |
| | | A3(2) | | |
| Orf63 | 259 | conserved hypothetical protein, Streptomyces | CAB62713, 32/50 | unknown |
| | | coelicolor A3(2) | | |
| Orf64 | 144 | NUDIX hydrolase, Frankia sp. EAN1pec | ZP_00572338, 38/56 | DNA repair |
| Orf65 | 197^{b} | putative binding-protein-dependent integral | CAE50656, n/a | ABC transporter |
| | | membrane protein, Corynebactrium diphtheriae | | |

^{a}Numbers are in amino acids
^{b}Incomplete Orf
^{c}NCBI accession numbers of closest homologs are given
*Involved in primary metabolism

[0073] Consistent with those functions, a convergent biosynthetic pathway is provided for synthesis of the Actinomadura sp. 21G792 enediyne. Four primary components of the complex (enediyne core, madurosamine, 2-hydroxy-3,6-dimethyl benzoic acid, and 3-(2-chloro-3-hydroxy-4-methoxyphenyl)-3-hydroxy-propanoic acid) are produced separately and then assembled to form the final bioactive product.

[0074] 3-(2-chloro-3-hydroxy-4-methoxy-phenyl)-3-hydroxy-propanoic acid moiety biosynthesis. To produce the 3-(2-chloro-3-hydroxy-4-methoxy-phenyl)-3-hydroxy-propionic acid-derived portion of the enediyne (FIG. 9), tyrosine is first converted to β-tyrosine by the gene product of orf18. Orf18 shows high similarity to several histidine and phenylalanine ammonia lyases, but is most similar to SgcC4 of the C-1027 biosynthetic pathway (73% identity, 84% similarity), which catalyzes the conversion of α-tyrosine to β-tyrosine. (Liu et al., 2002, Science, 297, 1170-73, Van Lanen et al., 2005, J. Am. Chem. Soc., 127, 11594-5). Next, β-tyrosine is activated as an aminoacyl adenylate by the adenylation (A) domain of the orf17 gene product, and transferred to the sulfhydryl group of the phosphopantetheinyl prosthetic group on the adjacent peptidyl carrier protein (PCP), forming β-tyrosinyl-S-Orf17. Orf17 is similar to a wide array of nonribosomal peptide synthetases (NRPSs). Based on sequence analysis of the deduced amino acid sequence, Orf17 comprises three functional domains, a condensation (C) domain, an A domain and a PCP domain (FIG. 10). See, Konz and Marahiel, 1999, Chem. Biol., 6, R39-R47. The substrate specificity code of the A domain was extracted from the region between the A4 and A5 A domain structural motif, revealing the specificity code DPCQVMVIAK (Table 4). Table 4 also depicts the substrate and substrate specificity codes for SgcC1 from the C1027 biosynthetic cluster (Challis et al., 2000, Chem. Biol. 7, 211-24) and GrsA from the gramicidin biosynthetic cluster (Stachelhaus et al., 1999, Chem. Biol., 6, 493-505).

TABLE 4
Comparison of Adenylation Domain Substrate Specificity Codes

| | Amino Acid Position (GrsA numbering) | | | | | | | | | | |
|---|---|---|---|---|---|---|---|---|---|---|---|
| | 235 | 236 | 239 | 278 | 299 | 301 | 322 | 330 | 331 | 517 | Substrate |
| GrsA | D | A | W | T | I | A | A | I | C | K | Phe |
| Orf17 | D | P | C | Q | V | M | V | I | A | K | β-Tyr |
| SgcC1 | D | P | A | Q | L | M | L | I | A | K | β-Tyr |

[0075] Orf17 is most similar to SgcC1 from the C-1027 biosynthetic cluster (41% identity, 49% similarity). SgcC1 encodes a type II non-ribosomal peptide synthetase (NRPS) that is composed of a lone A domain. In vitro characterization of the enzyme has shown that it specifically activates β-tyrosine prior to loading it on SgcC2, a type II NRPS composed of a single PCP domain. (Van Lanen et al, 2005). Comparison of the substrate specificity codes of SgcCI and Orf17 reveals that the codes are remarkably similar (DPCQVMVIAK for Orf17 versus DPAQLMLIAK for SgcCI). This similarity is not surprising as both enzymes activate the same substrate. Interestingly, the stop codon of orf17 overlaps the start of orf18 by 3 bp, indicating that the expression of these two genes might be translationally coupled. Coordinating the expression of these genes is not unexpected, as expression of orf17 without the concurrent expression of orf18 to supply β-tyrosine, would result in the production of the orf17 gene product without a supply of its intended substrate.

[0076] Once loaded on the PCP of Orf17 via a thioester linkage, β-tyrosinyl-S-Orf17 is next methylated by Orf15 to give 3-amino-3-(4-methoxy-phenyl)-propanyl-S-Orf17. Orf15 shows strong similarity to many S-adenosylmethionine (SAM)-dependent O-methyltransferases and possesses three sequence motifs common to SAM-dependent methyltransferases (Motif I—VVDVGTFTG, SEQ ID NO:166; Motif 2—PAADLVFL, SEQ ID NO:167; Motif 3—LLRPGGLLVA, SEQ ID NO:168). Kagan and Clarke, (1994) Arc. Biochem. Biophys., 310, 417-427. As Actinomadura sp. 21G792 enediyne possesses a single O-methyl group, Orf15 is the enzyme most likely to catalyze this reaction. This enzyme-tethered intermediate is subsequently hydroxylated by Orf9 to yield 3-amino-3-(3-hydroxy-4-methoxy-phenyl)-propanyl-S-Orf17. BlastP analysis indicates that Orf39 is a hydroxylase similar to many hydroxylases responsible for the hydroxylation of phenolic substrates. It is strikingly similar to SgcC of the C-1027 biosynthetic cluster (73% identity, 82% similarity), which was shown, in vitro, to hydroxylate a chlorinated β-tyrosinyl-S-PCP intermediate. (Liu et al, 2002; Van Lanen et al., 2005). Following hydroxylation, the orf19 gene product chlorinates the C-2 position of the aromatic ring to yield 3-amino-3-(2-chloro-3-hydroxy-4-methoxy-phenyl)-propanyl-S-Orf17. Orf19 is homologous to several alkyl halidases involved in secondary metabolism, most notably SgcC3 from the C-1027 biosynthetic cluster (58% identity, 70% similarity), which has been shown to perform the chlorination of PCP bound β-tyrosine. (Liu et al, 2002; Van Lanen et al., 2005).

[0077] Since the β-tyrosine derivative incorporated into the Actinomadura sp. 21G792 enediyne bears a hydroxyl group in place of the amino group, one can envision the amino group of the 3-amino-3-(2-chloro-3-hydroxy-4-methoxy-phenyl)-propanyl-S-Orf17 intermediate being replaced by Orf21 via oxidative deamination. BlastP analysis reveals that Orf21 shows similarity to several putative FAD and NADPH-dependant monooxygenases/hydroxylases and domain analysis shows that it contains an FAD binding domain common to many monooxygenases. This domain is common to amino acid oxidases where oxidative deamination is well documented, thus Orf21 is a likely candidate to perform this transformation. It is important to note however, that there are several other candidates that could potentially catalyze this reaction including Orf42, which is also similar to FAD and NADPH-dependant monooxygenases/hydroxylases. Additionally, two Orfs (Orf25 and Orf27), which are similar to P450 hydroxylases, are present in the biosynthetic cluster and as P450 hydroxylases have also been implicated in oxidative deamination reactions, one of these enzymes might also catalyze this step. (Li et al., 2000, J. Bacteriol. 182, 4087-95) Following oxidative deamination, reduction of the ketone likely introduced by Orf21 or one of the other candidate enzymes, is likely to occur. The most obvious enzyme capable of catalyzing such a reaction would be a ketoreductase, similar to those employed in polyketide biosynthesis. Examination of the Actinomadura sp. 21G792 enediyne biosynthetic cluster did not identify any enzymes showing similarity to ketoreductase-like enzymes. There are several enzymes in the cluster that have unknown functions that might catalyze the required reduction, or the enzyme responsible for catalyzing the oxidative deamination might also catalyze the reduction reaction. Alternatively, an enzyme encoded outside of the current biosynthetic pathway could catalyze the expected reduction. Following ketoreduction the tyrosine derivative 3-(2-chloro-3-hydroxy-4-methoxy-phenyl)-3-hydroxy-propanyl-S-Orf17, is ready to be incorporated into the Actinomadura sp. 21G792 enediyne complex. The incorporation of this component of the Actinomadura sp. 21G792 enediyne into the final product is discussed below.

[0078] This synthetic pathway is not considered limiting but merely illustrative. Using this as a model, one of ordinary skill in the art can design numerous other synthetic schemes to produce the 3-(2-chloro-3-hydroxy-4-methoxy-phenyl)-3-hydroxy-propanyl component of the Actinomadura sp. 21G792 chromophore or a derivative of this component.

[0079] Madurosamine moiety biosynthesis. Analysis of the Actinomadura sp. 21G792 enediyne biosynthetic pathway identified five genes likely involved in madurosamine (4-amino-4-deoxy-3-C-methyl-β-ribopyranose) biosynthesis (FIG. 11). The first step in madurosamine (MDA) biosynthesis, as with all deoxysugars, is activation of D-glucose-1-phosphate (G-1-P) by a glucose-dNDP synthase. Trefzer et al., 1999, Nat. Prod. Rep. 16, 283-99. Orf43, which is homologous to several glucose-dNDP synthases, is responsible for activating G-1-P. Based on sequence homology of Orf43 to other proteins in the GenBank database, it likely catalyzes the formation of dTDP or dUDP-glucose.

[0080] Next, Orf37, an enzyme highly homologous to dNDP-sugar dehydrogenases, oxidizes the primary alcohol to an acid, producing dNDP-D-glucuronate. Orf38, a probable dNDP-glucuronate decarboxylase, then converts dNDP-D-glucuronate to dNDP-xylose. A fragment amplified from orf38 was used as a probe to identify the first cosmid containing the Actinomadura sp. 21G792 enediyne biosynthetic cluster (See Examples) based on the prediction that biosynthesis of madurosamine might involve a dNDP-glucose-4,6-dehydratase including a 4,6-deoxyglucose intermediate. However, comparison of UDP-glucuronate decarboxylase and TDP-glucose-4,6-dehydratase amino acid sequences to that of Orf38 shows that the conserved amino acid motifs used by Decker et al. to design PCR primers used to amplify glucose-4,6-dehydratase genes, are also present in Orf8 and in the glucuronate decarboxylase sequences (FIG. 12). (Decker et al., 1994, FEMS Micro. Lett., 141, 195-201). Consequently it is not surprising that a glucuronate decarboxylase was amplified using these primers. Additionally, it should be noted that the stop codon of orf37 overlaps with the start codon of orf38, indicating that these orfs might be translationally coupled.

[0081] Following decarboxylation of dNDP-glucuronate, the C-3 hydroxyl of dNDP-D-xylose is epimerized by Orf49, producing dNDP-L-xylose. Orf49 is most similar to an uncharacterized protein from Thermobifida fusca (Accession no. AAZ55273.1) and its next most closely related homolog is ovmX (40% identity, 53% similarity), a putative NDP-sugar epimerase from Streptomyces antibioticus ATCC 11891 involved in the biosynthesis of oviedomycin. (Lombo et al., 2004, Chembiochem 5, 1181-7)

[0082] Following epimerization, the gene product of orf40 methylates the 3-carbon of dNDP-L-xylose. Orf40 shows significant similarity to a number of NDP-hexose C-methyltransferases and possesses three sequence motifs common to a wide variety of SAM dependent methyltransferases (Motif 1—IVEIGCNDG, SEQ ID NO:169; Motif 2—GPADVLYG, SEQ ID NO:170; Motif 3—LLKPDGIFVF, SEQ ID NO:171). (Kagan and Clarke, 1994, Arc. Biochem. Biophys., 310, 417-27). As a result, Orf40 is expected to perform this methylation. While another C-methylation is expected to occur in the biosynthesis of the 2-hydroxy-3,6-dimethyl-benzoic acid (HDBA) moiety of the Actinomadura sp. 21G792 enediyne, the C-methyltransferase expected to catalyze that methylation (Orf33), appears to form a small operon with the polyketide synthase responsible for generating the HDBA carbon skeleton, consequently Orf40 is not expected to participate in that transformation.

[0083] The methylated dNTP-sugar next undergoes C-4 transamination to form dNTP-madurosamine. This reaction is likely catalyzed by Orf36, which is highly homologous to SpnR (55% identity, 68% similarity) from the spinosyn biosynthetic cluster, which has been shown to carry out the C-4 transamination of a deoxysugar intermediate in the formation of D-forosamine. (Zhao et al., 2005, JACS, 127, 7692-3) The incorporation of the madurosamine component of Actinomadura sp. 21G792 enediyne into the final product will be discussed below.

[0084] This synthetic pathway is not considered limiting but merely illustrative. Using this as a model, one of ordinary skill in the art can design numerous other synthetic schemes to produce the MDA component of Actinomadura sp. 21G792 enediyne or a derivative of this component.

[0085] 2-Hydroxy-3,6-dimethyl-benzoic acid moiety biosynthesis. The 2-hydroxy-3,6-dimethyl benzoic acid (HDBA) component of Actinomadura sp. 21G792 enediyne is most likely synthesized by two gene products, Orf32 an iterative type I polyketide synthase (PKS) and Orf33, a SAM-dependent C-methyltransferase (FIG. 13). Until recently, the bacterial paradigm for the biosynthesis of aromatic polyketides called for an iterative type II PKS. (Shen et. al., 2003, Curr. Opin. Chem. Biol. 7, 285-95) Examination of the Actinomadura sp. 21G792 enediyne biosynthetic cluster did not reveal the presence of any genes homologous to type II PKSs. Orf32, however, showed significant similarity to NcsB (47% identity, 59% similarity), an iterative type I PKS responsible for the production of the napthoic acid moiety of neocarzinostatin and to several 6-methylsalicylic acid synthases of fungal origin. (Liu et al., 2005, Chem. Biol., 293-302) Orf32 consists of 5 domains common to type I PKSs including a ketosynthase (KS), acyltransferase (AT), dehydratase (DH), ketoreductase (KR) and acyl carrier protein (ACP). It catalyzes the formation of a linear tetraketide from one acetyl-coenzyme A (coA) and 3 malonyl-coAs by iterative decarboxylative condensation followed by selective ketoreduction and dehydration at C-4 and ketoreduction at C-2. The nascent tetraketide intermediate then undergoes a nonenzymatic intramolecular aldol condensation to form the cyclized, 6-methylsalicylic (6MSA) acid intermediate.

[0086] The gene product of orf33 subsequently methylates the C-3 position of the 6MSA intermediate to form HDBA. Orf33 is similar to a wide variety of SAM-dependent methyltransferases including N-, C- and O-methyltransferases. Consistent with its classification, Orf33 possesses three sequence motifs common to a wide variety of SAM-dependent methyltransferases (Motif 1—VLDLGGGDG, SEQ ID NO:172; Motif 2—DGCDAILY, SEQ ID NO:173; Motif 3—ALPEGGVCVV, SEQ ID NO:174). (Kagan and Clarke, 1994) While the other methyltransferases present in the biosynthetic cluster might catalyze this reaction, Orf33 is immediately upstream of Orf32 and appears to be part of a small operon devoted to the production of HDBA and as a result, is the enzyme most likely to perform this reaction. Release of the cyclized polyketide from the PKS does not require a thioesterase, as is the case with most polyketides. Rather, it is released via a ketene pathway, analogous to that reported for 6-methylsalicylic acid biosynthesis. Spencer and Jordan, (1992) Biochem. J., 288, 839-846.

[0087] Following release from Orf32, HDBA is activated as an aryl adenylate by the gene product of orf31. Orf13 is similar to a number of aryl acid AMP-ligases. The best-studied examples of these types of enzymes come from investigations into siderophore biosynthesis. In the case of many siderophores, an aryl acid such as salicylate or 2′,3′-dihydroxybenzoate is adenylated as a first step in the assembly of the nonribosomal peptide core of the siderophore (see, Crosa and Walsh, 2002, Microbiol Mol. Biol. Rev., 66, 223-49 for a review). In addition to activating the aryl acid as an adenylate, these enzymes also transfer the aryl acids to the sulfhydryl group of the phosphopantetheinyl prosthetic group of a so-called aryl carrier protein (ArCP). Comparison of the crystal structure of the 2′,3′-dihydroxybenzoate-AMP ligase (DhbE) involved in the biosynthesis of the siderophore bacillibactin to that of other adenylating enzymes, including the NRPS GrsA adenylation domain and firefly luciferase revealed that aryl acid-activating domains contain a signature sequence not present in amino-acid activating domains. (May et al., 2002, PNAS 99, 12120-5). In DhbE, the so-called core A4 motif normally present in amino acid-activating domains (YxFDxS), is replaced by the sequence motif HNYPLSSPG. In amino acid-activating domains the invariant Asp residue stabilizes the α-amino group of the amino acid substrate, while in aryl acid-activating domains, the Asp residue is replaced with the conserved neutral Asn, which hydrogen bonds with the 2′-hydroxyl group of DHBA or salicylic acid. (May et al., 2002). As HDBA possesses a 2′-hydroxyl, one would expect Orf31 to possess the aryl acid-activating A4 motif. Examination of the Orf13 sequence revealed the motif HNFPLASPG (SEQ ID NO:175), which is consistent with enzymes activating aryl acids (FIG. 14).

[0088] As for amino acid-activating domains of NRPSs (Stachelhaus et al., 1999, Chem. Biol., 6, 493-505; Challis et al., 2000, Chem. Biol. 7, 211-24), a substrate specificity code for aryl acid-activating domains can be extracted from the region between the A4 and A5 core motifs. (May et al., 2002). Table 5 shows the comparison of the Orf31 substrate specificity code to substrate specificity codes of other aryl acid-activating domains involved in the biosynthesis of the following secondary metabolites: virginiamycin (VisB, accession number BAB83672), pristinamycin (SnbA, accession number CAA67140), mycobactin (MbtA, accession number CAB03759), yersiniabactin (YbtE, accession number AAC69591), pyochelin (PchD, accession number AAD55799), neocarzinostatin (NcsB2, accession number AAM77987), vibriobactin (VibE, accession number 007899), vulnibactin (Vva1301, accession number BAC97327), bacillibactin (DhbE, accession number AAC44632), and myxochelin (MxcE, accession number AF299336). Positions are numbered according to the GrsA phenylalanine-activating adenylation domain (Stachelhaus et al., 1999). Residues proposed to be involved in discrimination between the activation of 2′,3′-dihydroxybenzoic acid (DHBA) and salicylic acid are identified with an asterisk. Residues at each position matching that found in Orf31 are shaded in grey. HPA, 3-hydroxypicolinic acid.

[0089] Comparison of the Orf31 substrate specificity code to the codes of other aryl acid-activating enzymes and two enzymes that activate 3-hydroxypicolinic acid indicates that Orf31 activates either salicylic acid or HDBA. (Table 5).

TABLE 5
Comparison of aryl acid-activating domain substrate specificity codes

| | Amino Acid Position (GrsA numbering) | | | | | | | | | | |
|---|---|---|---|---|---|---|---|---|---|---|---|
| | 235 | 236 | 239* | 278 | 299 | 301 | 322 | 330* | 331 | 517 | Substrate |
| Virginiamycin | N | F | C | S | Q | G | V | L | T | K | HPA |
| Pristinamycin | N | F | C | S | Q | G | V | L | T | K | HPA |
| Mycobactin | N | F | C | A | Q | G | V | L | N | K | Salicylic acid |
| Yersiniabactin | N | F | C | A | Q | G | V | L | C | K | Salicylic acid |
| Pyochelin | N | F | C | A | Q | G | V | I | C | K | Salicylic acid |
| Neocarzinostatin | G | F | G | S | Q | G | V | L | C | K | Naphthoic acid |
| Orf31 | N | F | S | S | H | G | V | I | C | K | HDBA |
| Vibriobactin | N | F | S | A | Q | G | V | V | N | K | DHBA |
| Vulnibactin | N | F | S | A | Q | G | V | V | N | K | DHBA |
| Bacillibactin | N | Y | S | A | Q | G | V | V | N | K | DHBA |
| Myxochelin | N | F | S | A | Q | G | V | V | N | K | DHBA |

[0090] After activation of salicylic acid or HDBA, Orf31 catalyzes the transfer of the activated aryl acid to the sulfhydryl group of the phosphopantetheinyl prosthetic group attached to the ArCP, encoded by orf16. Orf16 is a small protein (95 aa), which is similar to many PCP and ArCP involved in secondary metabolism (˜30-40% identical) and it possesses the characteristic 4′-phosphopantheine attachment motif, including the invariant serine residue (GTFFQLRGQSI; SEQ ID NO:176). After attachment to the ArCP, the salicylate derivative is ready for incorporation into the Actinomadura sp. 21G792 enediyne complex, as discussed below.

[0091] This synthetic pathway is not considered limiting but merely illustrative. Using this as a model, one of ordinary skill in the art can design numerous other synthetic schemes to produce the 2-hydroxy-3,6-dimethylbenzoic acid component of Actinomadura sp. 21G792 chromophore or a derivative of this component.

[0092] Enediyne core biosynthesis. At least fourteen genes were identified within the Actinomadura sp. 21G792 enediyne biosynthetic cluster whose deduced functions would support their roles in the Actinomadura sp. 21G792 enediyne core biosynthesis as outlined in FIG. 15. Orf5 encodes an iterative type I PKS that shows end-to-end sequence homology to the enediyne PKSs involved in the biosynthesis of neocarzinostatin (NcsE), C-1027 (SgcE) and calicheamicin (CalE8). (Liu et al., 2005; Liu et al., 2002; Ahlert et al., 2002, Science, 297, 1173-76). Like previously identified enediyne PKSs, Orf5 is composed of 6 domains: a KS, AT, ACP, KR, DH, and a so-called “terminal domain” (TD) (FIG. 16). The TD shows homology to 4′-phosphopantetheinyl transferases. Consequently, the TD has been proposed to catalyze the autoactivation of the enediyne PKS by post-translationally modifying the ACP active site serine with 4′-phosphopantetheine. (Zazopolous et al., 2003, Nature Biotech., 21, 187-90). Orf5 is expected to produce the nascent linear polyunsaturated polyketide intermediate from one acetyl-coA and 7 malonyl-coAs in an iterative fashion. The linear intermediate is possibly released from Orf5 and/or cyclized by Orf6, which shows similarity to a group of thioesterase proteins found in all enediyne biosynthetic clusters. Id. This group of proteins is predicted to function as thioesterases based on their homology to 4-hydroxybenzoyl-coA thioesterase of Pseudomonas sp. strain CBS-3. Id.

[0093] The polyketide intermediate is further processed by several gene products (Orfs 1-4, 7, 8, 11, 12, 14) to furnish the enediyne core (FIG. 15). These gene products are highly conserved in enedyine biosynthetic clusters. In addition to Orf5 and 6, homologs of Orfs 1-4 are found in all enediyne biosynthetic pathways studied to date (Id.), while homologs of Orfs 7, 8, 11, 12 and 14 are common to the 9-membered enediyne C-1027 and neocarzinostatin biosynthetic clusters. (Liu et al., 2005; Liu et al., 2002). Orfs 1-4, 11 and 14 are not homologous to any proteins of known function while Orfs 7, 8 and 12 resemble various oxidoreductases. Interestingly, it is possible that the expression of most of these genes is co-regulated, as orfs2-8 appear to be translationally coupled (e.g. the stop codon of orf2 overlaps the start codon of orf, and the stop codon of orf3 overlaps the start codon or orf4, etc.) as are orf11 and orf12.

[0094] The enediyne core (FIG. 15) is further modified by a minimum of three gene products, Orf30, Orf41 and Orf24, which are likely involved in producing a terminal amide from the C13-C14 epoxide of the enediyne core. orf30 encodes a probable epoxide hydrolase, orf41 encodes an alcohol dehydrogenase and orf24 encodes an aminotransferase. The fully modified enediyne core moiety is subsequently adorned with the other chromophore components to produce the active metabolite.

[0095] This synthetic pathway is not considered limiting but merely illustrative. Using this as a model, one of ordinary skill in the art can design numerous other synthetic schemes to produce the endiyne core of the Actinomadura sp. 21G792 chromophore or a derivative of this component.

[0096] Assembly of the Actinomadura sp. 21G792 chromophore (FIG. 17). The biosynthesis of Actinomadura sp. 21G792 enediyne follows the current paradigm for enediyne biosynthesis, which calls for a convergent strategy for the assembly of the individual components of the molecular complex. (Liu et al., 2005; Liu et al., 2002; Ahlert et al., 2002). Following production of each component, they are systematically attached to the enediyne core to eventually furnish the final molecule as outlined in FIG. 17. The attachment of the enediyne core to the 3-(2-chloro-3-hydroxy-4-methoxy-phenyl)-3-hydroxy-propanyl-moiety is likely catalyzed by the condensation domain of Orf17. The catalysis of this reaction by Orf17 is consistent with the general peptide bond-forming activity normally attributed to the condensation domains of NRPSs. The mechanism used to attach the aromatic ring of the 3-(2-chloro-3-hydroxy-4-methoxy-phenyl)-3-hydroxy-propanyl-moiety to the enediyne core via ether bond formation is not known, however, it may occur concurrently with the opening of the C5-C6 epoxide and/or involve one or more of the P450 or monooxygenase encoding orfs contained within the Actinomadura sp. 21G792 enediyne biosynthetic cluster. The madurosamine moiety is coupled to the enediyne core via an O-glycosidic linkage. The gene product of orf29, which shows strong sequence similarity to a wide variety of glycosyltransferases involved in natural product biosynthesis, catalyzes this transfer. Orf29 is most similar to SgcA6 from the C-1027 biosynthetic pathway (43% identity, 57% similarity), which is proposed to catalyze the glycosylation of the C-1027 enediyne core. (Liu et al., 2002). Finally, Orf20, a type I NRPS condensation domain, transfers the HDBA-moiety from the phosphopatetheine arm of Orf16 to the amino group of madurosamine, in a reaction analogous to peptide bond formation in nonribosomal peptide biosynthesis.

[0097] Using this as a model, one of ordinary skill in the art can design numerous other synthetic schemes to produce the Actinomadura sp. 21G792 chromophore or a derivative of the chromophore.

[0098] The invention provides novel biosynthetic pathways comprising biosynthetic components of the Actimomadura sp. 21G792 chromophore, wherein one or more components has been mutated, or substituted or supplemented with a component from a biosynthetic pathway of a different enediyne chromophore, such that a variant of the Actinomadura sp. 21G792 chromophore is produced. Using standard molecular genetic techniques, individual orfs or combinations of orfs, as provided above, can be manipulated to produce novel bioactive analogs of the Actinomadura sp. 21G792 chromophore and/or chromoprotein. In one preferred embodiment, a novel chromophore is coexpressed with the Actinomadura sp. 21G792 apoprotein. In another embodiment, the Actinomadura sp. 21G792 chromophore is coexpressed with a variant of the Actinomadura sp. 21G792 apoprotein. In yet another embodiment, a novel chromophore is coexpressed with a variant of the Actinomadura sp. 21G792 apoprotein.

[0099] In an embodiment of the invention, inactivation of orf15 in Actinomadura sp. 21G792 produces an analog lacking the O-methyl that is usually found on the β-tyrosinyl moiety of the molecule. (See, e.g., FIG. 10) This change leaves a hydroxyl group in place of an O-methyl (see R¹ below). One reason for providing the hydroxyl group substitution would be to use it as a chemical handle for the further chemical derivitization of the analog by standard synthetic chemistry techniques. Similarly, inactivation of the halogenase encoded by orf19 prevents chlorination of PCP bound α-tyrosine, with the result that Cl is absent from the Actinomadura sp. 21G79 analog (see R² below). The R³ group indicated below is normally CH₃ and can be changed to H by inactivation the product of orf40 which methylates the 3-carbon of dNDP-L-xylose.

[chemical structure]

[0100] The R⁴ group of the Actinomadura sp. 21G792 chromophore is

[chemical structure]

(designated R⁵), where R⁵ is linked to the sugar moiety at the amide nitrogen. Inactivation of orf32, causing production of an enediyne analog lacking the HDBA moiety (see, e.g., FIGS. 13, 17), or inactivation of orf20 results in substitution of R⁵ by NH₂. Further, the R⁴ moiety may be modified. For example,

[chemical structure]

(designated R⁶) is obtained by inactivating orf33.

[0101] In another embodiment, orf32 is inactivated as above, and the mutant is used to produce a library of Actinomadura sp. 21G792 enediyne analogs where the HDBA moiety is replaced by other aryl acids. The aryl acids are introduced by feeding the orf32 mutant a variety of native aryl acids, N-acetyl cysteamine-linked aryl acids, or aryl acids linked to other thioester carriers such as methyl thioglycolate in the fermentation broth. (See, e.g., Jacobsen et al. (1997) Science 277, 367-9). Each of the orfs involved in the addition of a component to the Actinomadura sp. 21G792 molecular complex can be mutated singly and in combination with other orfs to produce a large library of Actinomadura sp. 21G792 enediyne analogs for biological testing.

[0102] Thus, the invention provides compounds having the formula:

[chemical structure]

wherein R¹ is OH or OCH₃; R² is Cl or H; R³ is CH₃ or H; and R⁴ is selected from NH₂, R⁵, and R⁶. Further, by culturing an orf32 mutant in fermentation broth supplemented with particular native aryl acids, N-acetyl cysteamine-linked aryl acids, or aryl acids linked to other thioester carriers such as methyl thioglycolate, enediyne analogs can be produced wherein R⁴ is

[chemical structure]

or

[chemical structure]

wherein R¹′ is H, CH₃, OH, OCH₃, C₁, C₃H₇, or NO₂; R²′ is H, CH₂, NH₂, OH, F, OCH₃, F, Cl, NO₂, OC₂H₅, or NC₂H₆; R³′ is H, CH₃, Cl, CH₃, NH₂, OH, F, COH, OCH₃, Cl, OC₂H₅, or NO₂; and R⁴′ is OH or OCH₃.

[0103] In other embodiments, one or more orfs from different secondary metabolic pathways can be introduced into Actinomadura sp. 21G792. Selected orfs can be introduced into the host chromosome by homologous recombination or by site specific integration mediated, for example, by a phage int/attP functionality (e.g. pSET152 or a similar vector). Alternatively selected orfs can be introduced on a self replicating vector. Once expressed, the gene products can proceed to modify the Actinomadura sp. 21 G792 chromophore. For example, sgcA, sgcA1, sgcA2, sgcA3, sgcA4, sgcA5 and sgcA6 from the C-1027 biosynthetic gene cluster could be introduced into an Actinoinadura sp. 21G792 strain in which one or more of the madurosamine biosynthetic orfs had been inactivated, in order to produce an Actinomadura sp. 21G792 enediyne analog comprising the C-1027 deoxy aminosugar, or a derivative thereof, in place of madurosamine.

[0104] The invention also provides for the introduction of genes from the chromoprotein biosynthetic cluster of Actinomadura sp. 21G792 into other secondary metabolite-producing microorganisms to modify the cognate secondary metabolite produced by that organism. For example, an analog of a different enediyne chromophore (e.g., the C-1027 chromophore) is produced by providing a host that expresses the biosynthetic pathway for that chromophore, and into which one or more of the components has been substituted or supplemented from the chromoprotein biosynthetic pathway of Actinomadura sp. 21G792.

[0105] In addition to making analogs of the Actinomadura sp. 21G792 chromoprotein, one can also increase fermentation titers by inactivating negative regulators as well as by increasing the expression level or gene copy number of positive regulators. The Actinomadura sp. 21G792 biosynthetic cluster contains at least eight orfs (orfs 9, 10, 46, 50, 52, 55, 62 and 63) identified as putative transcriptional regulators based on homology to sequences contained in the GenBank database. The function of these regulators can be tested in a systematic fashion to identify which regulator are positive regulators and which are negative regulators. Based on the findings, one could rationally alter one or more of these genes to increase fermentation titers of the Actinomadura sp. 21G792 chromoprotein.

[0106] Typically, organisms that produce toxic secondary metabolites possess one or more genes that confer self-resistance to the producing organism. The products of these genes usually confer resistance by chemically modifying, sequestering or transporting the toxic metabolite. In some cases, the target of the metabolite is innately insensitive to the metabolite, or the target is modified to confer insensitivity to the metabolite. The Actinomadura sp. 21G792 biosynthetic cluster contains at least two orfs whose gene products are likely involved in self-resistance. orf23, which encodes the apoprotein component of the Actinomadura sp. 21G792 complex, is presumably involved in sequestering the active chromophore, thereby shielding the DNA of the producing organism from cleavage by the chromophore. The gene product of orf22, encodes a protein similar to many transmembrane efflux proteins, and is most similar to SgcB from the C-1027 biosynthetic pathway, which has been proposed to act as an efflux pump for the C-1027 chromophore-apoprotein complex (Liu et al. (2005) Chem. Biol., 293-302). Using orf22 and orf23, one can potentially confer resistance to the Actinomadura sp. 21G792 chromoprotein. In one embodiment, these orfs can be introduced into a cell chosen to heterologously express the Actinomadura sp. 21G792 biosynthetic pathway, thereby allowing that cell to produce high levels of Actinomadura sp. 21G792 chromoprotein while being immune to its toxic effects. In another embodiment, these orfs can be introduced into donor cells chosen for biotransformation of Actinomadura sp. 21G792. Such cells would otherwise be killed by the extreme toxicity of Actinomadura sp. 21G792 before biotransformation could occur.

[0107] The entire Actinomadura sp. 21G792 biosynthetic cluster, or a selected portion, can be expressed in heterologous hosts such as bacteria. Examples of useful bacteria include, for example, members of the genera Streptomyces, Actinomadura, Nonomurea, Micromonospora, Escherichia, and Pseudomonas. (See, e.g., Pfeifer et al., 2001; Martinez et al., 2004) The biosynthetic cluster can also be heterologously expressed in a eukaryotic host such as yeast. In one embodiment, the Actinomadura sp. 21G792 biosynthetic cluster is advantageously expressed in an organism already modified for high level secondary metabolite production, thereby allowing for increased levels of Actinomadura sp. 21G792 chromoprotein production relative to that usually achieved using Actinomadura sp. 21G792. (See, e.g., Rodriguez et al., 2003, J. Ind. Microbiol. Biotechnol. 30, 480-8). In another embodiment, the Actinomadura sp. 21G792 biosynthetic cluster is advantageously expressed in an organism that is particularly amenable to genetic manipulation in order to expedite the generation of Actinomadura sp. 21G792 chromoprotein analogs (See, e.g., Bentley et al., 2002, Nature 417, 141-7; Binnie et al., 1997, Trends Biotechnol. 15, 315-20).

[0108] Various methods are known in the art that are useful for transferring recombinant DNAs encoding all or part of the Actinomadura sp. 21G792 chromoprotein biosynthetic pathway. Broad host-range plasmids are available that can be used to transfer and express such DNAs in a variety of hosts (e.g., pIJ101 for Streptomyces (Kieser et al., 1982, Mol. Gen. Genet. 185:223-8), pJRD215 for Actinomyces (Yeung et al., 1994, J. Bacteriol. 176:4173-6)). Methods for transferring such vectors include conjugation, electroporation and protoplast transformation. Shuttle vectors capable of replication in Escherichia coli and conjugal transfer from E. coli to gram-positive bacterial species such as Streptomyces spp. can also be used. (See, e.g., Mazodier et al., 1989, J. Bacteriol. 171:3583-5; Kieser et al., 2000, Practical Streptomyces genetics. A laboratory manual. John Innes Foundation, Norwich, United Kingdom).

[0109] It may be desired to prepare pharmaceutical compositions comprising a chromoprotein, wherein the chromoprotein comprises a complex of an apoprotein of the present invention and a chromophore, preferably the chromophore produced by Actinomadura sp. 21G792. Preferably, the polypeptide is attached to the chromophore via a non-covalent bond. Generally, preparing pharmaceutical compositions will entail preparing a pharmaceutical composition that is essentially free of pyrogens, as well as any other impurities that could be harmful to humans or animals. It may also be desirable to employ appropriate buffers to render the complex stable and allow for uptake by target cells.

[0110] Aqueous compositions of the present invention include an effective amount of the chromoprotein, further dispersed in a pharmaceutically acceptable carrier or aqueous medium. Such compositions also are referred to as inocula. The phrases “pharmaceutically or pharmacologically acceptable” refer to compositions that do not produce an adverse, allergic or other untoward reaction when administered to an animal, or a human, as appropriate.

[0111] As used herein, “pharmaceutically acceptable carrier” includes any and all solvents, dispersion media, coatings, antibacterial and antifungal agents, isotonic and absorption delaying agents and the like. The use of such media and agents for pharmaceutical active substances is well known in the art. Except insofar as any conventional media or agent is incompatible with the chromoproteins, its use in the therapeutic compositions is contemplated. Supplementary active ingredients, including antibacterial or anti-tumor agents, also may be incorporated into the compositions.

[0112] In an embodiment of the invention, a chromophore of the invention is taken up by a cell, for example, by pinocytosis. In another embodiment, the chromophore is modified so as to be targeted to a particular cell or cell type. In one such embodiment, a a chromoprotein may be delivered to target tissues in the form of polymers or conjugates employing monoclonal antibodies or other proteinaceous carriers as the targeting unit. Various polymer-based and antibody conjugate delivery systems are known and are currently being utilized in chemotherapeutic strategies involving the naturally-occurring C-1027 enediyne. In the present invention, the chromoproteins may, for example, be chemically-modified to form poly(styrene-co-maleic acid)-conjugated chromoproteins useful as therapeutics, particularly chemotherapeutics. (See, e.g., Maeda and Konno, 1997, in Neocarzinostatin: the Past, Present, and Future of an Anticancer Drug, H. Maeda, K. Edo, N. Ishida, Eds., Springer-Verlag, New York, pp. 227-267).

[0113] Polymeric micelles containing both hydrophobic and hydrophilic segments are new drug delivery systems recently developed to increase therapeutic indexes for chemotherapeutic agents (Yokoyama et al., 1990, Cancer Res. 50:1693-700; Kabanov et al., 1989, FEBS Lett. 258:343-5). Micelle size can be controlled so that the micelle particles are more permeable to blood vessels in tumor tissues than in normal tissues, owing to the enhanced permeability and retention (EPF) effect (Maeda, 2001, Adv Enzyme Regul. 41:189-207). This allows a favorable drug distribution in tumor tissues and hence the in vivo efficacy is expected to increase. The 21G792 chromoprotein can be non-covalently incorporated into specially designed micelles by mixing with a block copolymer solution. The metabolic stability of the resulting drug can be significant increased (Yokoyama et al., 1991, Cancer Res. 51:3229-36), which potentially is advantageous for delivering 21G792 chromoprotein in cancer chemotherapy.

[0114] The chromoprotein (i.e., the apoprotein or chromophore) can be conjugated to a protein for delivery to a cell or a pathogen by the use of chemical linkers, or other related methods. The chromophore in the 21G792 chromoprotein has been reacted with sodium azide and secondary amines to give a series of derivatives. These derivatives contain an azide or secondary amino group at C-5 to replace the hydroxyl group in the natural chromophore. A linker with an amino group at one terminus and a carboxyl group at the other can be used to connect a monoclonal antibody and the chromophore to form a chromophore-antibody conjugate for targeted drug delivery. The amino group of the linker that is to replace the C-5 hydroxyl group is designed so that the conjugate can be hydrolyzed back to the chromophore under the more acidic condition in tumor tissues. An exemplary linkage is depicted in FIG. 30.

[0115] In addition, the chromoproteins may be conjugated with monoclonal antibodies to form monoclonal antibody (MAb)-chromoprotein conjugates. Antibodies with high affinity for antigens, preferably having specificity for antigenic determinants on the surface of malignant cells, are a natural choice as targeting moieties. Antibody-mediated specific delivery of the chromoproteins to tumor cells is expected to not only augment their anti-tumor efficacy, but also prevent nontargeted uptake by normal tissues, thus increasing their therapeutic indices. Examples of such antibody carriers that may be used in the present invention include monoclonal antibodies, chimeric antibodies, humanized antibodies, human antibodies, biologically active fragments thereof and their genetically or enzymatically engineered counterparts. Preferably, such antibodies are directed against cell surface antigens expressed on target cells and/or tissues in proliferative disorders such as cancer. The anti-CD33 monoclonal antibody is illustrative of a useful Mab for this approach and may effectuate the targeting of a chromoprotein to cancerous tissues in various contexts, including in patients afflicted with acute myeloid leukemia. (See, e.g., Sievers et al., 1999, Blood 93, 3678-84) Another example of a useful monoclonal antibody conjugate is described in PCT Publication No. WO 03/029623 in which, for example, an anti-CD22 monoclonal protein is conjugated to an enediyne for targeted delivery to B-cell lymphomas. As previously noted, several MAb-C-1027 conjugates are under evaluation as promising anticancer drugs. (Brukner, 2000, Curr. Opinion Oncologic, Endocrine & Met. Invest. Drugs 2, 344). Other proteinaceous carriers in addition to antibody carriers include hormones, growth factors, antibody mimics, and their genetically or enzymatically engineered counterparts, hereinafter referred to singularly or as a group as “carriers.” The essential property of a carrier is its ability to recognize and bind to an antigen or receptor associated with undesired cells and to be subsequently internalized. Examples of carriers that are applicable in the present invention are disclosed in U.S. Pat. No. 5,053,394, which is incorporated herein in its entirety. Preferred carriers for use in the present invention are antibodies and antibody mimics.

[0116] A number of non-immunoglobulin protein scaffolds have been used for generating antibody mimics that bind to antigenic epitopes with the specificity of an antibody (PCT publication No. WO 00/34784). For example, a “minibody” scaffold, which is related to the immunoglobulin fold, has been designed by deleting three beta strands from a heavy chain variable domain of a monoclonal antibody (Tramontano et al., 1994, J. Mol. Recognit. 7:9-24). This protein includes 61 residues and can be used to present two hypervariable loops. These two loops have been randomized and products selected for antigen binding, but thus far the framework appears to have somewhat limited utility due to solubility problems. Another framework used to display loops is tendamistat, a protein that specifically inhibits mammalian alpha-amylases and is a 74 residue, six-strand beta-sheet sandwich held together by two disulfide bonds, (McConnell and Hoess, 1995, J. Mol. Biol. 250:460-70). This scaffold includes three loops, but, to date, only two of these loops have been examined for randomization potential.

[0117] Other proteins have been tested as frameworks and have been used to display randomized residues on alpha helical surfaces (Nord et al., 1997, Nat. Biotechnol. 15, 772-7; Nord et al., 1995, Protein Eng. 8, 601-8), loops between alpha helices in alpha helix bundles (Ku and Schultz, 1995, Proc. Natl. Acad. Sci. USA 92, 6552-6), and loops constrained by disulfide bridges, such as those of the small protease inhibitors (Markland et al., 1996, Biochemistry 35, 8045-57; Markland et al., 1996, Biochemistry 35, 8058-67; Rottgen and Collins, 1995, Gene 164, 243-50; Wang et al., 1995, J. Biol. Chem. 270, 12250-6).

[0118] The targeting molecule and chromoprotein may be covalently associated by chemical cross-linking or through genetic fusion such as by application of recombinant DNA techniques. In the latter approach, the apoprotein may be fused at its C-terminus or N-terminus to the N-terminus or C-terminus of the cell targeting protein molecule. When the cell targeting molecule is an antibody, the C-terminus of the apoprotein is preferably fused to the N-terminus of the light and/or heavy chain of the antibody. For chemical cross-linking, some common protein-antibody linkers are succinate esters and other dicarboxylic acids, glutaraldehyde and other dialdehydes. Other such linkers are well known in the art.

[0119] Solutions of therapeutic compositions may be prepared in water suitably mixed with a surfactant (e.g., hydroxypropylcellulose). Dispersions also may be prepared in glycerol, liquid polyethylene glycols, mixtures thereof, and in oils. Under ordinary conditions of storage and use, these preparations contain a preservative to prevent the growth of microorganisms.

[0120] The therapeutic compositions of the present invention are advantageously administered in the form of injectable compositions either as liquid solutions or suspensions; solid forms suitable for solution in, or suspension in, liquid prior to injection may also be prepared. These preparations also may be emulsified. A typical composition for such purpose comprises a pharmaceutically acceptable carrier. For instance, the composition may contain 10 mg, 25 mg, 50 mg or up to about 100 mg of human serum albumin per milliliter of phosphate buffered saline. Other pharmaceutically acceptable carriers include aqueous solutions, non-toxic excipients, including salts, preservatives, buffers and the like.

[0121] Examples of non-aqueous solvents are propylene glycol, polyethylene glycol, vegetable oil and injectable organic esters such as ethyloleate. Aqueous carriers include water, alcoholic/aqueous solutions, saline solutions, parenteral vehicles such as sodium chloride, Ringer's dextrose, etc. Intravenous vehicles include fluid and nutrient replenishers. Preservatives include antimicrobial agents, anti-oxidants, chelating agents and inert gases. The pH and exact concentration of the various components of the pharmaceutical composition are adjusted according to well known parameters.

[0122] Additional formulations are suitable for oral administration. Oral formulations include such typical excipients as, for example, pharmaceutical grades of mannitol, lactose, starch, magnesium stearate, sodium saccharine, cellulose, magnesium carbonate and the like. The compositions take the form of solutions, suspensions, tablets, pills, capsules, sustained release formulations or powders. When the route is topical, the form may be a cream, ointment, salve or spray.

[0123] The therapeutic compositions of the present invention may include classic pharmaceutical preparations. Administration of therapeutic compositions according to the present invention will be via any common route so long as the target tissue is available via that route. This includes oral, nasal, buccal, rectal, vaginal or topical administration. Topical administration would be particularly advantageous for treatment of skin cancers, to prevent chemotherapy-induced alopecia or other dermal hyperproliferative disorder. Alternatively, administration will be by orthotopic, intradermal, subcutaneous, intramuscular, intraperitoneal or intravenous injection. Such compositions would normally be administered as pharmaceutically acceptable compositions that include physiologically acceptable carriers, buffers or other excipients. For treatment of conditions of the lungs, the preferred route is aerosol delivery to the lung. Volume of the aerosol is between about 0.01 ml and 0.5 ml. Similarly, a preferred method for treatment of colon-associated disease would be via enema. Volume of the enema is between about 1 ml and 100 ml.

[0124] An effective amount of the therapeutic composition is determined based on the intended goal. The term “unit dose” or “dosage” refers to physically discrete units suitable for use in a subject, each unit containing a predetermined-quantity of the therapeutic composition calculated to produce the desired responses, discussed above, in association with its administration, i.e., the appropriate route and treatment regimen. The quantity to be administered, both according to number of treatments and unit dose, depends on the protection desired.

[0125] Precise amounts of the therapeutic composition also depend on the judgment of the practitioner and are peculiar to each individual. Factors affecting dose include physical and clinical state of the patient, the route of administration, the intended goal of treatment (alleviation of symptoms versus cure) and the potency, stability and toxicity of the particular therapeutic substance.

### EXAMPLES

[0126] It is to be understood and expected that variations in the principles of the invention herein disclosed may be made by one skilled in the art and it is intended that such modifications are to be included within the scope of the present invention.

[0127] Examples of the invention which follow are set forth to further illustrate the invention and should not be construed to limit the invention in any way.

### Isolation and Characterization of the Chromoprotein and Apoprotein

### Example 1

### Isolation and Purification of the Actinomadura sp. 21G792 Chromoprotein

[0128] Actinomadura sp. 21G792 was preserved as frozen whole cells (frozen vegetative mycelia, FVM) prepared from cells grown for 72 hours in ATCC medium 172 (Dextrose 1%, Soluble Starch 2%, Yeast Extract 0.5%, and N-Z Amine Type A 0.5%, CaCO₃ 0.1% pH 7.3). Glycerol was added to 20% and the cells were frozen at −150° C.

[0129] A seed medium having a pH of 6.9 was prepared containing: 1.0% dextrose; 2.0% soluble starch; 0.5% yeast extract; 0.5% N-Z Amine Type A (Sheffield); and 0.1% CaCO₃. In a 25 mm×150 mm glass culture tube, 7 ml of the seed medium and two glass beads were inoculated with cells of Actinomadura sp. 21G792 cultured on ATCC agar medium #172 (ATCC Media Handbook, 1^{st} edition, 1984). Sufficient inoculum from the agar culture was used to provide a turbid seed after 72 hours of growth. The primary seed tubes were incubated at 28° C., 250 rpm using a gyro-rotary shaker with a 2 inch throw, for 72 hours. The primary seed (˜14% inoculum) was then used to inoculate a 250 ml Erlenmeyer flask containing 50 ml of medium #172. These secondary seed flasks were incubated at 28° C., 250 rpm using a gyro-rotary shaker (2″ stroke), for 48 hours.

[0130] A fermentation production medium having a pH of 6.9 was prepared containing: 2.0% sucrose; 0.5% molasses; 0.5% CaCO₃; 0.2% peptone; 0.002% magnesium sulfate-7H₂O; 0.001% ferrous sulfate-7H₂O; 0.05% sodium bromide; and 0.2% sodium acetate. Sixty 250 ml Erlenmeyer flasks were each prepared with 50 ml of the fermentation production medium and inoculated with 2 ml (4.0%) of the secondary seed fermentation and incubated at 28° C. at 250 rpm using a gyro-rotary shaker (2″ stroke). The fermentation as described was then allowed to proceed for approximately 72 to 96 hours and harvested for further processing.

[0131] The combined whole broth (60×50 ml) was centrifuged at 3800 rpm for 30 minutes. The supernatant was then lyophilized and the residual powder was suspended in a small volume (e.g., 300 ml) of H₂O. Upon centrifugation, the brownish solution was then loaded onto a glass column containing 6 L of Sephadex G75 in H₂O at 4° C. in the dark. Fractions of 40 ml each were collected and tested in a biochemical induction assay (BIA). The most potent fractions were then combined (15 fractions, 600 ml total) and lyophilized. The grayish powder was then dissolved in H₂O (4 ml) and analyzed by HPLC to contain two major peaks, one corresponding to the apoprotein and the other corresponding to the chromoprotein.

[0132] The above solution was subjected to preparative HPLC chromatography on a TosoHaas DEAE 5PW column (13 um particle size, 21.5 mm×15 cm in size) with a buffer system (0-0.5 M linear gradient NaCl with constant 0.05 M Tris-HCl in 30 min) at a flow rate of 4 ml/min. The respective peaks of apoprotein and chromoprotein were collected, desalted with Pierce Dialysis Cassette (7000 MWCO), and lyophilized. The resulting powders of apoprotein and chromoprotein were then repurified by the same preparative HPLC conditions, desalted, and lyophilized. The final products of chromoprotein (grayish powder, 10.5 mg) and apoprotein (white powder, 19.8 mg) were analyzed by analytical HPLC (FIGS. 1 and 3, respectively). The ultraviolet absorption (UV) spectra of the chromoprotein and apoprotein are shown in FIGS. 2 and 4.

[0133] The molecular weight of the apoprotein was determined to be 12.92409 kDa by MALDI-MS. The MALDI spectrum is shown in FIG. 5.

### Example 2

### DNA Isolation and Sequencing of the Actinomadura sp. 21G792 Apoprotein

[0134] Genomic DNA was isolated from Actinomadura sp. 21G792 based on a modification to the procedure described in Hopwood et al. (1985), Genetic manipulations of Streptomyces. A Laboratory Manual. Norwich: John Innes Foundation. Approximately 1 ml of a frozen mycelia glycerol stock was inoculated into a 25 mm×150 mm seed tube containing 10 ml of MYM media (4 g/l maltose, 4 g/l yeast extract, 10 g/l malt extract, pH 7.0) and 2-6 mm glass beads. The culture was grown at 28° C. and 200 rpm for 5 days. The cells were then pelleted by centrifugation at 3000×g for 10 min. The supernatant was discarded and the pellet was suspended in 300 μl of T₅₀-E₂₀ (Tris 50 mM-EDTA-20 mM) containing 5 mg/ml lysozyme and 0.1 mg/ml RNase and incubated at 37° C. for 1 hr with gentle mixing every 15 min. 50 μl of 10% SDS was then added and the sample was thoroughly mixed. Next, 85 μl of 5 mM NaCl was added and the sample was again thoroughly mixed. The sample was then extracted with 400 μl phenol/chloroform/isoamyl alcohol (50/49/1). After vortexing the sample thoroughly, it was centrifuged at 10,000×g for 20 min at room temperature. Following centrifugation, the aqueous phase was removed and placed in a new microcentrifuge tube. An equal volume of room temperature isopropanol was added to the sample and thoroughly mixed by inversion. The sample was let stand at room temperature for 5 min. The sample was then centrifuged at 12,000×g for 30 min at 4° C. The isopropanol was carefully poured out of the tube and the DNA pellet rinsed with 1 ml of cold 70% ethanol. After being let stand in ice for 5 min, the 70% ethanol was poured out of the tube and the DNA was air dried for 10 minutes. The DNA was dissolved in 0.3 ml of sterile water. DNA integrity and concentration were estimated by agarose gel electrophoresis.

[0135] Escherichia coli; Plasmid and Small Scale Cosmid DNA preparations: Plasmid DNA and small-scale cosmid DNA preparations were performed using the Qiaprep Spin MiniPrep Kit (Qiagen Inc, Valencia, Calif., USA) according to the manufacturer's specifications. Cosmid: Cosmid DNA was isolated using the Qiagen Large Construct Kit (Qiagen Inc, Valencia, Calif., USA) according to the manufacturer's specifications.

[0136] An Actinomadura sp. 21G792 genomic library was constructed using the pWEB Cosmid Cloning Kit (Epicentre Technologies, Madison, Wis., USA) according to the manufacturer's specifications. The general library construction protocol was as follows. 10 μg of genomic DNA was randomly sheared into 30-45 kb fragments by passing the genomic DNA through a Hamilton HPLC/GC syringe. Following shearing, the fragmented DNA was end-repaired to produce blunt-ended fragments using the end-repair enzyme mix contained in the kit. The sheared and end-repaired DNA was then separated on a 1% low melting point agarose gel using linear T7 DNA (˜40 Kb) to serve as a molecular weight marker. Genomic DNA approximately equal in size to the T7 DNA was cut from the gel and the DNA was eluted from the agarose. The purified DNA was then ligated into the pWEB vector. Following ligation, the ligated insert DNA was packaged into lambda phage particles using the MaxPlax Lambda Packaging Extracts provided with the pWEB cosmid cloning kit. The phage extract was then titered to determine the colony-forming units per milliliter. Upon determining the titer of the phage extract, an appropriate amount of extract was used to infect E. coli EPI100 host cells and the infected cells were plated on Difco Luria agar plates containing 50 μg/ml of kanamycin to give a cell density of approximately 200 colonies per plate.

[0137] Library screening strategy and methodology; dNDP-glucose-4,6-dehydratase probe generation. Generally, the genes required to produce a particular antibiotic are clustered in the producing organism's genome. Further, there is precedence for clustering of an apoprotein gene with the genes encoding proteins involved in the biosynthetic pathway of the corresponding chromophore (Liu et al., 2002, Science 297:1170-3). The chromophore produced by Actinomadura sp. 21G792 contains the amino sugar 4-amino-4-deoxy-3-C-methyl-β-ribopyranose, which is attached to the enediyne core. Because a dNDP-D-glucose-4,6-dehydratase (DH) was expected to catalyze a step in the biosynthesis of this sugar, a DH probe was employed to isolate biosynthetic cluster.

[0138] To generate a DH probe, the polymerase chain reaction (PCR) was used to amplify a DH gene fragment from the genomic DNA of Actinomadura sp. 21G792. Primers for the expected ˜500 bp DH gene fragment (dehydra1: 5′-CSGGSGSSGCSGGSTTCATSGG (SEQ ID NO:152) and dehydra2: 5′-GGGWRCTGGYRSGGSCCGTAGTTG (SEQ ID NO:153)) were identical to those described by Decker et al., 1996, FEMS Microbiol. Lett. 141, 195-201. PCR was conducted using JumpStart REDTaq Ready Mix PCR Reaction Mix (Sigma-Aldrich Corp, St. Louis, Mo.) according to the manufacturer's specifications. The primers were used at a final concentration of 0.5 μM. PCR was performed on a Biometra T gradient thermocycler. The starting denaturing temperature was 96° C. for 4 min. The following 30 cycles were as follows: denaturing temperature 96° C. (45 sec), annealing temperature 66° C. (45 sec), extension temperature 72° C. (3 min). At the end, the final extension temperature was 72° C. for 10 min.

[0139] The ˜500 bp amplicon was cloned into pCR2.1 using the TOPO TA Cloning Kit (Invitrogen Corp, Carlsbad, Calif.) following the manufacturer's recommendations. A portion (2.5 μl) of the cloning reaction was used to transform E. coli TOP10 cells (Invitrogen Corp, Carlsbad, Calif.) which were subsequently plated on Difco Luria Agar containing 50 μg/ml kanamycin, 40 μg/ml X-gal and 0.2 mM IPTG to facilitate blue/white screening of recombinant clones. Twenty white colonies were picked and their plasmid DNA was isolated. Sequencing of these clones revealed that two different DH gene fragments had been cloned. Comparison of the deduced amino acid sequences revealed that one of the DH fragments (contained in plasmid p34598) was most similar to a DH involved in calicheamicin biosynthesis. As the calicheamicin structure contains 2 amino sugars, it was predicted that the DH fragment contained in p34598 might also be involved in amino sugar production, and thus was chosen as the probe for the chromoprotein gene cluster.

[0140] Colony hybridization: The Actinomadura sp. 21G792 genomic library was screened by colony hybridization using the p34598 DH fragment. Recombinant colony DNA was transferred to Nytran SuPerCharge nylon membrane discs (Schleicher & Schuell BioScience, Inc., Keene, N.H.) as described by Sambrook and Russell (2001), Molecular Cloning, A Laboratory Manual, Cold Spring Harbor Laboratory Press (3^{rd} ed.). The DH probe was prepared using PCR and primers dehydra1 and dehydra2 to amplify the insert of p34598. The amplified PCR product was separated by agarose gel electrophoresis and the 530 bp fragment was isolated from the agarose. This fragment was then labeled with [α-³²P]dCTP (3000 Ci/mmol Amersham Bioscience, Piscataway, N.J.) using the Megaprime DNA Labeling kit according to the manufacturer's specifications (Amersham Bioscience, Piscataway, N.J.). The nylon membrane on which the DNA samples were immobilized was washed in 6×SSC, then placed in a hybridization bottle with prewarmed (65° C.) prehybridization solution (6×SSC/5×Denhardt's reagent/0.5% (w/v) SDS and 100 μg/ml of denatured, sheared herring sperm DNA) and “pre-hybridized” for 2 h. The denatured probe was then added, and hybridization proceeded overnight at 65° C. The following day the membrane was washed once with prewarmed (65° C.) 2×SSC/0.1% SDS (Wash Solution 1) for 1 h and once with prewarmed (65° C.) 1×SSC/0.1% SDS (Wash Solution 2) for 1 h. The nylon membrane was then wrapped in Saran wrap and exposed to Kodak X-omat AR film for 4 h. The exposed films were developed using a Kodak X-omat 2000A processor. Twenty-two colonies appeared to hybridize to the probe. These colonies were picked and grown in Difco Luria Broth containing 50 μg/ml kanamycin. The cosmid DNA was purified from the cultures and cut with Not I. The restriction digests were separated by agarose gel electrophoresis and the DNA was transferred to a Nytran SuPerCharge nylon membrane as described by Sambrook and Russell (2001). This membrane was probed using the same conditions used for the colony hybridization, again using the p34598 insert as a probe. Nine cosmids positively hybridized to the probe. The cosmids and approximate sizes of the fragments that hybridized to the probe were: 21gB: 15-20 kb, 21gC: 15-20 kb, 21gD: 8-12 kb, 21gF: 15-20 kb, 21gG: 3-4 kb, 21gI: 1.2-2.5 kb, 21gK: 15-20 kb, 21gL: 2.5-3 kb, 21gV: 2-2.5 kb.

[0141] Apoprotein—specific oligonucleotide probe hybridization: Edman protein sequencing was used to determine the first 38 amino acid residues of the apoprotein, N-terminus DTVTVNYDDVGYPSDIAVTIDAPATAGVGDTATFEVSV (SEQ ID NO:154). To definitively identify which cosmids might contain the apoprotein gene sequence, a hybridization experiment was conducted using, as a probe, a degenerate oligonucleotide that was based on residues 4-12 of the 38 amino acid (aa) sequence of the apoprotein N-terminus. Specifically, the sequence of the oligonucleotide was 5′-ACSGTSAACTACGACGACGTSGGNTAC (SEQ ID NO:155).

[0142] The cosmids that hybridized to the DH probe were digested with Not I and transferred to a Nytran SuPerCharge nylon membrane. The oligonucleotide was end labeled with [γ-³²P]dATP (6000 Ci/mmol; Amersham Bioscience, Piscataway, N.J.) using the KinaseMax 5′ End-Labeling Kit according to the manufacturer's recommendations (Ambion Inc., Austin, Tex.). Unincorporated radioactive nucleotides were removed using the NucAway Spin Column Kit according to the manufacturer's directions (Ambion Inc., Austin, Tex.). The DNA-carrying nylon membrane was “pre-hybridized” for 3 h at 50° C. in a solution containing 6×SSC, 5×Denhardt's reagent, 0.05% sodium pyrophosphate, 0.5% SDS and 100 μg/ml sheared and denatured salmon sperm DNA. Following this step, the pre-hybridization solution was replaced with 7 ml pre-warmed (50° C.) hybridization solution containing 6×SSC, 0.5% sodium phosphate, 1×Denhardt's reagent and 100 μg/ml yeast tRNA. The labeled probe was added to this solution and the hybridization was incubated at 50° C. for 22 h. Next, the hybridization solution was discarded and the membrane was rinsed briefly with 20 ml of room temperature TMACL wash buffer (3 M TMACL, 50 mM Tris, 0.2% SDS). It was then washed with an additional 50 ml of pre-warmed (67° C.) TMACL wash buffer for 55 min at 67° C. For the final wash, the membrane was washed with 50 ml of pre-warmed (50° C.) Wash Solution 1 for 10 min at 50° C. The membrane was then wrapped in Saran wrap and exposed to Kodak X-omat AR film for 24 h.

[0143] Cosmids 21gD, 21gG and 21gK hybridized to the probe. An ˜4.5 kb signal was observed in the lanes containing 21gD and 21gK DNA, while an ˜5.2 kb signal was observed in the lane containing 21gG DNA. To confirm this hybridization result, PCR was conducted using 21gD cosmid DNA as the template and degenerate PCR primers designed to amplify a 98 bp fragment from the apoprotein. The PCR primers CP-FWD3 (5′-ACSGTSAAYTAYGAYGAYGT; SEQ ID NO:156) and CP-REV4 (5′-ACYTCRAASGTSGCSGTRTC; SEQ ID NO:157) were designed using the reverse translated DNA sequence deduced from the 36 aa sequence of the apoprotein. PCR was performed using JumpStart REDTaq Ready Mix PCR Reaction Mix (Sigma-Aldrich Corp, St. Louis, Mo.) according to the manufacturer's specifications. The primers were used at a final concentration of 2.0 μM. The PCR was performed on a Biometra Tgradient thermocycler. The starting denaturing temperature was 96° C. for 4 min. The following 5 cycles were as follows: denaturing temperature 96° C. (45 sec), annealing temperature 40° C. (45 sec), extension temperature 72° C. (2 min). The next 30 cycles were as follows: denaturing temperature 96° C. (30 sec), annealing temperature 55.7-72.0° C. (45 sec; 8 temperatures tested within range), extension temperature 72° C. (2 min). At the end, the final extension temperature was 72° C. for 10 min. Several bands were generated by these conditions; however, using annealing temperatures 55.7° C., 58.6° C. and 61.4° C., an intense band of approximately 100 bp was generated. The 100 bp amplicon was cloned into pCR2.1 using the TOPO TA Cloning Kit (Invitrogen Corp, Carlsbad, Calif.) following the manufacturer's recommendations. A portion (2.5 μL) of the cloning reaction was used to transform E. coli TOP10 cells (Invitrogen Corp, Carlsbad, Calif.) which were subsequently plated on Difco Luria Agar containing 50 μg/ml kanamycin, 40 μg/ml X-gal and 0.2 mM IPTG to facilitate blue/white screening of recombinant clones. Ten white colonies were picked and their plasmid DNA isolated. Sequencing of these clones revealed that 4 clones (p35546, p35547, p35550, p35554) contained DNA whose deduced amino acid sequence matched that of the 36 aa apoprotein fragment exactly, thus confirming that the gene encoding the apoprotein was contained in cosmid 21gD.

[0144] Elucidation of complete apoprotein DNA sequence in cosmid 21gD. To determine the full sequence of the gene encoding the apoprotein, sequencing primers were designed from the DNA sequence of the 98 bp PCR product amplified above. The following primers were used for the initial round of sequencing using cosmid 21gD as a template:

| | |
|---|---|
| ApoSeqCode1: | |
| 5′-GGCTACCCGTCGGACATCG; | (SEQ ID NO:158) |
| ApoSeqCode2: | |
| 5′-GGACATCGCCGTGACCATCG; | (SEQ ID NO:159) |
| ApoSeqComp1: | |
| 5′CCGGCGCGTCGATGGTCAC; | (SEQ ID NO:160) |
| ApoSeqComp2: | |
| 5′-CTCGAAGGTGGCGGTGTC. | (SEQ ID NO:161) |

[0145] The first round of sequencing generated 1440 bp of sequence. Using the CodonPreference program, a small 498 bp open reading frame (ORF) was identified. Comparison of the deduced amino acid sequence of this orf to the partial amino acid sequence of the Actinomadura sp. 21G792 apoprotein (determined by Edman protein sequencing) confirmed that the ORF did encode the apoprotein, as the two amino acid sequences were identical. Additionally, the molecular weight of the deduced amino acid sequence, 12926 Da, was in good agreement with the molecular weight of the apoprotein as determined by high resolution MALDI MS, 12924.09. Also, the DNA sequence of the apoprotein was confirmed further by extensive sequencing of both DNA strands using primers flanking the orf encoding the apoprotein (designated aseA).

[0146] The deduced amino acid sequence of the pre-apoprotein, which contains the leader peptide and the apoprotein, is provided in SEQ ID NO:64. The nucleotide sequence encoding the pre-apoprotein is provided in SEQ ID NO:63. The deduced amino acid sequence of the apoprotein is provided in SEQ ID NO:150. The nucleotide sequence encoding the apoprotein is provided in SEQ ID NO:149. Finally, a figure describing the DNA sequence of the pre-apoprotein, the corresponding amino acid sequence, the putative upstream ribosome binding site, and the splitting site between the leader peptide and apoprotein is provided in FIG. 6.

### Example 3

### DNA Isolation and Sequencing of the Remainder of the Actinomadura sp. 21G792 Chromoprotein Biosynthetic Cluster

[0147] Identification of distal sequences of the Actinomadura sp. 21G792 apoprotein gene cluster. Sequences adjacent to the portion of the Actinomadura sp. 21G792 apoprotein gene cluster present in cosmid 21gD were identified as described below. Along with cosmid 21gD, these sequences are thought to constitute substantially the entire biosynthetic cluster of the Actinomadura sp. 21G792 chromoprotein—i.e. the genes responsible for assembling the chromoprotein. Locations of the open reading frames are identified in Table 1. Functions of the encoded proteins were deduced by comparison with GenBank sequence deposits (Table 3). The arrangement of the open reading frames is depicted in FIG. 7.

[0148] First, a probe was generated from cosmid 21gD by amplifying a 904 bp fragment from the end of the cosmid containing the partial type II peptide synthetase condensation domain (orf20; FIG. 7) using primers 21gDpr1FWD (5′-GCTCGTCGGGTTCTTCTAC; SEQ ID NO:162) and 21gDpr1REV (5′-GACTTCGCGATAGCTCTC; SEQ ID NO:163). PCR amplification was conducted using KOD polymerase (Novagen) with 5% DMSO according to the manufacturers recommendations. Primers were used at a concentration of 0.5 mM. Cosmid 21gD was used as template DNA. The cycling conditions were as follows: 1 cycle of 96° C. for 2 min, followed by 30 cycles of 96° C. for 1 min, 61.2° C. for 1 min, and 72° C. for 2 min, followed by 1 cycle of 72° C. for 10 min. The PCR reaction was examined by agarose gel electrophoresis and the 904 bp band was eluted from the agarose as previously described. The 904 bp amplicon was used to probe the Actinomadura sp. 21G792 genomic cosmid library as previously described for the 4,6-dehydratase probe. 38 colonies that hybridized to the probe were cultured (5 ml Difco Luria Broth containing 50 μg/ml kanamycin) and cosmid DNA was purified. The purified cosmids were end sequenced using sequencing primer sites contained in the pWEB vector. Analysis of the DNA sequences indicated that one cosmid (41417) overlapped with cosmid 21gD by 1184 bp. Cosmid 41417 was subsequently sequenced in its entirety, open reading frames were identified, and functions of the encoded proteins were deduced.

[0149] The portion of the biosynthetic cluster distal to the other end of cosmid 21gD was identified by screening the cosmids previously identified as having hybridized to the putative dNDP-D-glucose-4,6-dehydratase fragment cloned in p34598 (used to identify cosmid 21gD). These cosmids were screened using PCR primers designed to amplify a 1043 bp product from the 5′ end of cosmid 21gD (product corresponds to nucleotides 70,572 to 71,614 of the complete biosynthetic cluster). The primers 21gDendFWD (5′-GCGACGAAGGACCCGAAGG; SEQ ID NO:164) and 21gDendREV (5′-CACGCTGGCCCGCCCCTTC; SEQ ID NO:165) were used to screen each of the cosmids using 10-100 ng of each cosmid as template in a standard 25 μl PCR reaction (KOD Hot Start polymerase; Novagen, San Diego, Calif., USA) along with 0.5 μM of each primer. The only cosmids that supported amplification of the expected 1043 bp DNA fragment were cosmids 21gB and 21gC. End sequencing of these cosmids revealed that cosmid 21gB overlapped cosmid 21gD by 17,411 nucleotides, while cosmid 21gC overlapped cosmid 21gD by 22,796 nucleotides. Since cosmid 21gB overlapped less with the known cluster sequence, and thereby represented a greater potential for yielding a longer sequence extension than cosmid 21gC, it was chosen for sequencing. Sequencing revealed that cosmid 21gB contained a 33,133 bp insert which represented a 18,442 bp sequence extension, bringing the total number of base pairs sequenced to 90,573 (FIG. 7). As before, the cosmid was sequenced, open reading frames were identified, and functions of the encoded proteins were deduced.

[0150] Biological Properties of the 21G792 Chromoprotein

### Example 4

### In Vitro Anti-Tumor Activity

[0151] The p53/p21 checkpoint monitors the integrity of the genome and blocks cell cycle progression in the event of DNA damage. Disruption of the checkpoint by deletion of the p21 gene results in failure to arrest in response to DNA damage ultimately leading to cell death through apoptosis. Since loss of this checkpoint is a hallmark of cancer cells, an isogenic pair of cell lines, wherein one pair of the cell line (p21+/+) has an intact p21 gene and one member (p21−/−) has a deletion in the p21 gene, can be used to screen for potential anti-tumor compounds by identifying molecules that preferentially induce apoptosis in p21-deficient cells.

[0152] The Actinomadura sp. 21G792 chromoprotein was added to an isogenic pair of cell lines (p21+/+ and p21−/−). As shown in Table 6, the chromoprotein was highly selective for p21−/− cells, as the IC₅₀ was 13-fold higher for p21+/+ cells. Also, as shown in Table 7, the chromoprotein showed excellent potency in a human tumor cell line panel, as the IC₅₀ ranged from 1 to 47 ng/ml. The apoprotein alone, however, was inactive.

TABLE 6
Sensitivity of p21−/− Cells to Actinomadura sp. 21G792 Chromoprotein

Isogenic cell lines

| | p21+/+ | p21−/− | Selectivity Ratio |
|---|---|---|---|
| IC₅₀ (μg/ml) | 90 ± 32 | 7 ± 2 | 13 |

Mean ± SD, n = 3

TABLE 7
Potency of Actinomadura sp. 21G792 Chromoprotein Against
Human Tumor Cell Lines

| Tumor Cell Line | Tissue | IC₅₀ (μg/ml) |
|---|---|---|
| DLD1 | Colon | 8 |
| HCT116 | Colon | 1 |
| HT29 | Colon | 8 |
| LoVo | Colon | 2 |
| SW620 | Colon | 2 |
| BT474 | Breast | 47 |
| MCF-7 | Breast | 2 |
| MDA-MB-361 | Breast | 5 |
| HN5 | Head & Neck | 4 |
| LOX | Melanoma | 1 |
| PC3 | Prostate | 22 |

### Example 5

### DNA Damage Induced by the Chromoprotein

[0153] A COMET assay obtained from Trevigen, Inc. was used to detect DNA damage. HCT116 p21+/+ and −/− cells were subjected to various amounts of the 21G792 chromoprotein and mitoxantrone. As shown in FIG. 18, the chromoprotein induced dose-dependent DNA strand breaks occur in both p21-proficient and p21-deficient cells at >100 ng/ml concentrations.

### Example 6

### DNA Cleavage Induced by the Chromoprotein

[0154] Supercoiled φX174 DNA was incubated with various concentrations of the 21G792 chromoprotein and analyzed by gel electrophoresis. It was observed that the chromoprotein induced single strand breaks and double strand breaks, the reaction continued to progress over 24 hours, and DNA cleavage did not require a reducing agent (dithiothreitol, DTT), unlike calicheamicin. The gel electrophoresis is shown in FIG. 19. Nicked refers to single strand breaks in the DNA and linear refers to double strand breaks.

### Example 7

### Digestion of Histone H1 by the Chromoprotein

[0155] Chromoprotein enediynes have previously been shown to cleave histones (Zein et al., 1993, Proc. Natl. Acad. Sci. USA 90, 8009-12; Zein et al, 1995, Chem & Biol 2, 451-5; Zein et al., 1995, Biochem 34, 11591-7), and although this activity is controvorsial (Heyd et al., 2000, J. Bacteriol. 182, 1812-8), it was presumed to be due to a proteolytic activity of the apoprotein. Histone H1 was incubated with various concentrations of the chromoprotein in 50 mM Tris-Cl, pH 7.5 overnight at 37° C. (FIG. 20) Digestions of histone were assessed by SDS-polyacrylamide gel electrophoresis (SDS-PAGE), followed by staining of the gel with GelCode Blue (Pierce Biotechnology, Inc, Rockford, Ill.). Digestion of histone HI was inhibited by addition of DNA, indicating that the same mechanisms required for DNA cleavage (e.g., a free-radical based mechanism) are also involved in digesting proteins. Consistent with this, digestion of histones was inhibited by the addition of free radical scavengers, 30 mM glutathione or N-acetyl cysteine (not shown), but not by protease inhibitors. Calicheamicin, a non-protein-containing enediyne, did not cleave histone H1, indicating the requirement of an intact chromophore-protein complex for this activity.

### Example 8

### Specificity of Digestion by the Chromoprotein

[0156] The order of preference of digestion of histones by the chromoprotein is H1>H2A>H2B>H3>H4 (FIG. 21). The chromoprotein also cleaves other basic proteins such as myelin basic protein, but not neutral/acidic proteins such as bovine serum albumin. This can explain the requirement of the apoprotein component of the chromophore for histone cleaving activity: the acidic apoprotein may deliver the chromophore to histones and other basic proteins by electrostatic interaction, allowing the chromophore to cleave the basic proteins by a free-radical based mechanism.

### Example 9

### Digestion of Histone H1 in HeLa Cells by the Chromoprotein

[0157] To study whether the digestion of histones by the chromoprotein occurs in intact cells, HeLa cells were incubated with compounds overnight at 37° C. Cell lysates were analysed by SDS-PAGE and protein immunoblotting using anti-histone H1 antibodies (Santa Cruz Biotechnologies). Incubation of cells with the chromoprotein resulted in reduced histone H1 in cells (FIG. 22). No effect was observed with bleomycin, another DNA damaging agent, or with calicheamicin. This demonstrates that the chromoprotein is capable of digesting histones within intact cells. This activity can contribute to antitumor effects by digesting histones in chromatin, making the DNA more accessible for cleavage. This appears to be a unique activity of the chromoprotein enediynes.

### Example 10

### Chromoprotein Induction of the G1/S Checkpoint

[0158] HCT116 (p21+/+ and p21−/−) cells were exposed to the chromoprotein at various concentrations. As shown in FIG. 23A, exposure to the chromoprotein resulted in the activation of the p53 checkpoint for all tested concentrations. Induction of the p21 protein was seen in the p21+/+ cells only. Activation of the DNA damage checkpoint by the Actinomadura sp. 21G792 chromoprotein was confirmed by demonstrating phosphorylation of the serine-15 amino acid residue in p53, which is known to be important for the transcriptional activation of the p53 protein (FIG. 23B). Furthermore, induction of apoptosis was preferentially observed in p21−/− cells compared with p21+/+ cells, when treated with the Actinomadura sp. 21G792 chromoprotein as shown by the cleavage of poly ADP ribose phosphorylase (PARP) (FIG. 23B). This is consistent with the lower IC50 value in the p21−/− cells.

### Example 11

### In Vivo Anti-Tumor Activity

[0159] The human tumor cell lines or fragments LoVo (colon cancer); HCT116 (colon); HT29 (colon); LOX (melanoma); HN5 (head & neck); and PC-3 (prostate) were implanted under the skin of athymic (nude) mice and allowed to form a tumor mass. When the tumors reached a size of 90-200 mg, the saline control vehicle or various concentrations of the Actinomadura sp. 21G792 chromoprotein formulated in saline was administered intravenously to the mice. The mice received subsequent doses on days 5 and 9 and the relative tumor growth was observed. The results are shown in the graphs in FIG. 24 and FIG. 25. Inhibition of tumor growth of up to 80% for mice receiving the chromoprotein was observed.

### Example 12

### Toxicity of the Chromoprotein

[0160] Toxicology studies suggest that, except for bone marrow suppression, the Actinomadura sp. 21G792 chromoprotein is well-tolerated in nude mice. Specifically, saline control vehicle or the chromoprotein in various doses was administered intravenously to six nude mice on days 1, 5, and 9. Microscopic studies of the mice showed that all mice receiving the chromoprotein exhibited bone marrow necrosis, with the mice receiving the most chromoprotein exhibiting the most severe lesions. A clinical pathology experiment revealed that mice receiving the most chromoprotein exhibited the lowest number of white blood cells and lymphocytes. No adverse effects, however were observed in the intestine, nerves, spinal cord, liver, or at the site of injection. The microscopic finding and clinical pathology summaries are provided in Tables 8 and 9.

TABLE 8
Microscopic Finding Summary

| | | | Bone Marrow |
|---|---|---|---|
| Group | Treatment | Dose (mg/kg) | Necrosis^{a} |
| 1 | Vehicle | 0 | 0/6 |
| 2 | 21G792 | 3 | 6/6 (1.7) |
| 3 | 21G792 | 6 | 6/6 (3) |

^{a}number with lesion/total number examined(x): average lesion severity where 0 = WNL, 1 = slight, 2 = mild, 3 = moderate, 4 = marked, 5 = severe

TABLE 9
Clinical Pathology

| | | | | Lymphocytes |
|---|---|---|---|---|
| Group | Treatment | Dose (mg/kg) | WBC (cells/μl) | (cells/μl) |
| 1 | Vehicle | 0 | 5100 | 3900 |
| 2 | 21G792 | 3 | 1430 | 290 |
| 3 | 21G792 | 6 | 1280 | 40 |

### Example 13

### Transport of the Chromoprotein by P-GP (MDR-1)

[0161] Human PGP (MDR1) is an ATP-dependent efflux pump which is capable of transporting many drugs across cell membranes. High level expression of this protein has been linked to multiple drug resistance of tumors. As shown in Table 10 below, the Actinomadura sp. 21G792 chromoprotein is a poor MDR1 substrate, and cells expressing clinically relevant levels of MDR1 (KB-8-5 cells) remain sensitive to the complex. Notably, calicheamicin, which does not have a protein component, is a good substrate for MDR1. The protein component of the chromoprotein probably protects the chromophore from drug efflux mediated by MDR1, and may be responsible for the beneficial antitumor effects in colon cell lines which often express MDR1.

TABLE 10
IC₅₀ of Actinomadura sp. 21G792 Chromophore and
Calicheamicin Against P-GP Expressing Cells

IC₅₀ (ng/ml)^{a}

| Cell Line | P-GP Levels | 21G792 | Calicheamicin |
|---|---|---|---|
| KB | − | 10 | 3 |
| KB-8-5 | + | 6 | 21 |
| KB-V-1 | +++ | 142 | >1000 |

^{a}mean of two independent experiments

### Example 14

### Uptake of FITC-Tagged Chromoprotein in HCT116 Cells

[0162] To determine the mechanism by which the chromoprotein enters cells and exerts its biological activity, the chromoprotein was labeled with a fluorescent tag (FITC) using EZ-Label fluorescent labeling kit (Pierce Biotechnology), according to the manufacturer's recommendation. No loss of biological activity was observed upon labeling. Uptake of labeled material by HCT116 colon carcinoma cells was studied by fluorescent microscopy. Optimum incubation time with cells was 3-6 hours. Most of the label appeared in the cytoplasm, although weak staining was also observed in the nucleus (FIG. 26). Even though nuclear accumulation is low, the amount is most likely sufficient for biological activity given the potency of the complex.

### Example 15

### Uptake of FITC-Tagged Apoprotein and Chromoprotein in HCT116 Cells

[0163] To determine whether an intact complex of chromophore and apoprotein is required for cellular and nuclear entry, the chromoprotein and apoprotein were labeled with FITC. Uptake of labeled material was studied by fluorescent microscopy. Uptake was similar for both apoprotein and chromoprotein. (FIG. 27), suggesting that cellular entry is not dependent on an intact chromophore-protein complex.

### Example 16

### Uptake of FITC-Tagged Chromoprotein: Competition with Unlabeled Complex

[0164] To determine whether the entry of chromoprotein into cells is mediated by a saturable (e.g. cell surface receptor-dependent) process, HCT116 cells were incubated with FITC-labeled chromoprotein (FIG. 28, right panel) or apoprotein (FIG. 28, left panel) in the absence or presence of 10-fold excess of unlabeled reagent (unlabelled chromoprotein or apoprotein, respectively). Cells were analysed by fluorescent microscopy (left) or flow cytometry (right). No competition of label was observed, suggesting that uptake of labeled material was not a receptor-mediated process. Furthermore, a single homogeneous peak observed in flow cytometry histograms indicated uniform uptake of labeled reagent by all cells. Numbers in the histograms are mean channel numbers (FITC fluorescence).

### Example 17

### Effect of Energy Depletion and Microtubule Disruption on Uptake of FITC-Tagged Apoprotein by HCT116 Cells

[0165] The above experiments suggest that entry of chromoprotein into cells is not a receptor-mediated process. Other means by which a protein complex can enter cells is pinocytosis, where caveolae in the surface of the cell pinch off to form pinosomes that are free within the cytoplasm of the cell. Since pinocytosis is an energy-dependent process that requires a functional tubulin cytoskeletal network, we examined the effect of sodium azide, an energy uncoupling agent and nocodazole, an agent which disrupts the tubulin cytoskeleton on cellular uptake. HCT116 cells were treated with FITC-labeled apoprotein in the absence or presence of sodium azide or nocodazole. Both treatments inhibited uptake of label (FIG. 29). The concentration of nocodazole (100 mM) was shown to be sufficient to disrupt microtubules (right panels). These data suggest that uptake of apoprotein is an energy-dependent process utilizing the microtubule network. Since our data appears to rule out a receptor-mediated process, pinocytosis is most likely involved.

1. An isolated nucleic acid comprising a nucleotide sequence that is at least about 70% identical to the nucleotide sequence of an orf of the chromoprotein biosynthetic gene cluster of Actinomadura sp. 21G792 (NRRL 30778) having SEQ ID NO:1, SEQ ID NO:3, SEQ ID NO:5, SEQ ID NO:7, SEQ ID NO:9, SEQ ID NO:11, SEQ ID NO:13, SEQ ID NO:15, SEQ ID NO:17, SEQ ID NO:19, SEQ ID NO:21, SEQ ID NO:23, SEQ ID NO:25, SEQ ID NO:27, SEQ ID NO:29, SEQ ID NO:31, SEQ ID NO:33, SEQ ID NO:35, SEQ ID NO:37, SEQ ID NO:39, SEQ ID NO:41, SEQ ID NO:43, SEQ ID NO:45, SEQ ID NO:47, SEQ ID NO:49, SEQ ID NO:51, SEQ ID NO:53, SEQ ID NO:55, SEQ ID NO:57, SEQ ID NO:59, SEQ ID NO:61, SEQ ID NO:63, SEQ ID NO:65, SEQ ID NO:67, SEQ ID NO:69, SEQ ID NO:71, SEQ ID NO:73, SEQ ID NO:75, SEQ ID NO:77, SEQ ID NO:79, SEQ ID NO:81, SEQ ID NO:83, SEQ ID NO:85, SEQ ID NO:87, SEQ ID NO:89, SEQ ID NO:91, SEQ ID NO:93, SEQ ID NO:95, SEQ ID NO:97, SEQ ID NO:99, SEQ ID NO:101, SEQ ID NO:103, SEQ ID NO:105, SEQ ID NO:107, SEQ ID NO:109, SEQ ID NO:111, SEQ ID NO:113, SEQ ID NO:115, SEQ ID NO:117, SEQ ID NO:119, SEQ ID NO:121, SEQ ID NO:123, SEQ ID NO:125, SEQ ID NO:127, SEQ ID NO:129, SEQ ID NO:131, SEQ ID NO:133, SEQ ID NO:135, SEQ ID NO:137, SEQ ID NO:139, SEQ ID NO:141, SEQ ID NO:143, SEQ ID NO:145, SEQ ID NO:147, or SEQ ID NO:149, or the complement thereof.

2. The isolated nucleic acid of claim 1, wherein the isolated nucleotide sequence is identical to the nucleotide sequence of an orf of the chromoprotein biosynthetic gene cluster of Actinomadura sp. 21G792 (NRRL 30778).

3. The isolated nucleic acid of claim 1, which comprises the chromoprotein biosynthetic gene cluster having SEQ ID NO:151.

4. An isolated nucleic acid that comprises a sequence that encodes the amino acid sequence of an orf of the chromoprotein biosynthetic gene cluster of Actinomadura sp. 21G792 (NRRL 30778) having SEQ ID NO:2, SEQ ID NO:4, SEQ ID NO:6, SEQ ID NO:8, SEQ ID NO:10, SEQ ID NO:12, SEQ ID NO:14, SEQ ID NO:16, SEQ ID NO:18, SEQ ID NO:20, SEQ ID NO:22, SEQ ID NO:24, SEQ ID NO:26, SEQ ID NO:28, SEQ ID NO:30, SEQ ID NO:32, SEQ ID NO:34, SEQ ID NO:36, SEQ ID NO:38, SEQ ID NO:40, SEQ ID NO:42, SEQ ID NO:44, SEQ ID NO:46, SEQ ID NO:48, SEQ ID NO:50, SEQ ID NO:52, SEQ ID NO:54, SEQ ID NO:56, SEQ ID NO:58, SEQ ID NO:60, SEQ ID NO:62, SEQ ID NO:64, SEQ ID NO:66, SEQ ID NO:68, SEQ ID NO:70, SEQ ID NO:72, SEQ ID NO:74, SEQ ID NO:76, SEQ ID NO:78, SEQ ID NO:80, SEQ ID NO:82, SEQ ID NO:84, SEQ ID NO:86, SEQ ID NO:88, SEQ ID NO:90, SEQ ID NO:92, SEQ ID NO:94, SEQ ID NO:96, SEQ ID NO:98, SEQ ID NO:100, SEQ ID NO:102, SEQ ID NO:104, SEQ ID NO:106, SEQ ID NO:108, SEQ ID NO:110, SEQ ID NO:112, SEQ ID NO:114, SEQ ID NO:116, SEQ ID NO:118, SEQ ID NO:120, SEQ ID NO:122, SEQ ID NO:124, SEQ ID NO:126, SEQ ID NO:128, SEQ ID NO:130, SEQ ID NO:132, SEQ ID NO:134, SEQ ID NO:136, SEQ ID NO:138, SEQ ID NO:140, SEQ ID NO:142, SEQ ID NO:144, SEQ ID NO:146, SEQ ID NO:148, or SEQ ID NO:150.

5. The nucleic acid of claim 1 that encodes an apoprotein.

6. The nucleic acid of any of claim 1 that encodes a preapoprotein.

7. A vector comprising the nucleic acid of claim 1.

8. The vector of claim 7, wherein the nucleic acid is operably linked to a regulatory nucleic acid sequence that controls gene expression.

9. The vector of claim 7, wherein gene expression is constitutive or inducible.

10. The vector of claim 7, wherein the vector is a cosmid.

11. A host cell comprising the nucleic acid of claim 1.

12. A host cell comprising the vector of claim 7.

13. The host cell of claim 12, wherein the host cell is a prokaryotic cell.

14. The host cell of claim 13, wherein the prokaryotic cell is of a genus selected from the group consisting of Actinomyces, Actinomadura, Streptomyces, or Micromonospora.

15. The host cell of claim 13, wherein the prokaryotic cell is Escherichia coli.

16. The host cell of claim 12, wherein the host cell is a eukaryotic cell.

17. A method of expressing a protein comprising transfecting a host cell with the vector of claim 7 and incubating the cell under conditions suitable for expression of the protein.

18. An isolated polypeptide comprising the amino acid sequence having at least about 70% homology to SEQ ID NO:2, SEQ ID NO:4, SEQ ID NO:6, SEQ ID NO:8, SEQ ID NO:10, SEQ ID NO:12, SEQ ID NO:14, SEQ ID NO:16, SEQ ID NO:18, SEQ ID NO:20, SEQ ID NO:22, SEQ ID NO:24, SEQ ID NO:26, SEQ ID NO:28, SEQ ID NO:30, SEQ ID NO:32, SEQ ID NO:34, SEQ ID NO:36, SEQ ID NO:38, SEQ ID NO:40, SEQ ID NO:42, SEQ ID NO:44, SEQ ID NO:46, SEQ ID NO:48, SEQ ID NO:50, SEQ ID NO:52, SEQ ID NO:54, SEQ ID NO:56, SEQ ID NO:58, SEQ ID NO:60, SEQ ID NO:62, SEQ ID NO:64, SEQ ID NO:66, SEQ ID NO:68, SEQ ID NO:70, SEQ ID NO:72, SEQ ID NO:74, SEQ ID NO:76, SEQ ID NO:78, SEQ ID NO:80, SEQ ID NO:82, SEQ ID NO:84, SEQ ID NO:86, SEQ ID NO:88, SEQ ID NO:90, SEQ ID NO:92, SEQ ID NO:94, SEQ ID NO:96, SEQ ID NO:98, SEQ ID NO:100, SEQ ID NO:102, SEQ ID NO:104, SEQ ID NO:106, SEQ ID NO:108, SEQ ID NO:110, SEQ ID NO:112, SEQ ID NO:114, SEQ ID NO:116, SEQ ID NO:118, SEQ ID NO:120, SEQ ID NO:122, SEQ ID NO:124, SEQ ID NO:126, SEQ ID NO:128, SEQ ID NO:130, SEQ ID NO:132, SEQ ID NO:134, SEQ ID NO:136, SEQ ID NO:138, SEQ ID NO:140, SEQ ID NO:142, SEQ ID NO:144, SEQ ID NO:146, SEQ ID NO:148, or SEQ ID NO:150.

19. The isolated polypeptide of claim 18, wherein the amino acid sequence is identical to SEQ ID NO:2, SEQ ID NO:4, SEQ ID NO:6, SEQ ID NO:8, SEQ ID NO:10, SEQ ID NO:12, SEQ ID NO:14, SEQ ID NO:16, SEQ ID NO:18, SEQ ID NO:20, SEQ ID NO:22, SEQ ID NO:24, SEQ ID NO:26, SEQ ID NO:28, SEQ ID NO:30, SEQ ID NO:32, SEQ ID NO:34, SEQ ID NO:36, SEQ ID NO:38, SEQ ID NO:40, SEQ ID NO:42, SEQ ID NO:44, SEQ ID NO:46, SEQ ID NO:48, SEQ ID NO:50, SEQ ID NO:52, SEQ ID NO:54, SEQ ID NO:56, SEQ ID NO:58, SEQ ID NO:60, SEQ ID NO:62, SEQ ID NO:64, SEQ ID NO:66, SEQ ID NO:68, SEQ ID NO:70, SEQ ID NO:72, SEQ ID NO:74, SEQ ID NO:76, SEQ ID NO:78, SEQ ID NO:80, SEQ ID NO:82, SEQ ID NO:84, SEQ ID NO:86, SEQ ID NO:88, SEQ ID NO:90, SEQ ID NO:92, SEQ ID NO:94, SEQ ID NO:96, SEQ ID NO:98, SEQ ID NO:100, SEQ ID NO:102, SEQ ID NO:104, SEQ ID NO:106, SEQ ID NO:108, SEQ ID NO:110, SEQ ID NO:112, SEQ ID NO:114, SEQ ID NO:116, SEQ ID NO:118, SEQ ID NO:120, SEQ ID NO:122, SEQ ID NO:124, SEQ ID NO:126, SEQ ID NO:128, SEQ ID NO:130, SEQ ID NO:132, SEQ ID NO:134, SEQ ID NO:136, SEQ ID NO:138, SEQ ID NO:140, SEQ ID NO:142, SEQ ID NO:144, SEQ ID NO:146, SEQ ID NO:148, or SEQ ID NO:150.

20. The isolated polypeptide of claim 18, wherein the polypeptide is an apoprotein and is capable of forming a non-covalent complex with a chromophore.

21. The isolated polypeptide of claim 20, wherein the complex is capable of cleavage of single- or double-stranded DNA.

22. The isolated polypeptide of claim 20, wherein the chromophore is from Actinomadura sp. 21G792.

23. An isolated chromoprotein comprising a non-covalent complex of the polypeptide of claim 20 and the chromophore of Actinomadura sp. 21G792 (NRRL 30778).

24. An oligonucleotide that specifically hybridizes to a DNA molecule having the nucleotide sequence of SEQ ID NO:151, or the complement thereof.

25. The oligonucleotide of claim 24, which is selected from the group consisting of SEQ ID NO:158, SEQ ID NO:159, SEQ ID NO:160, SEQ ID NO:161, SEQ ID NO:162, SEQ ID NO:163, and the complementary sequences thereof.

26. The oligonucleotide of claim 24, which is degenerate and is selected from the group consisting of SEQ ID NO:155, SEQ ID NO:156, SEQ ID NO:157, and the complementary sequences thereof.

27. A method of identifying a nucleic acid that encodes an apoprotein of a nine-membered enediyne containing chromoprotein which comprises contacting the nucleic acid with the oligonucleotide of any one of claims 24 and detecting specific hybridization of the oligonucleotide to the nucleic acid.

28. A method of identifying a nucleic acid that encodes an apoprotein of a nine-membered enediyne containing chromoprotein which comprises contacting the nucleic acid with oligonucleotides having SEQ ID NO:156 and SEQ ID NO:157 and detecting specific hybridization by amplification.

29. The method of claim 27, wherein the nucleic acid is from an organism of the order Actinomycetales.

30. The method of claim 29, wherein the organism is of a genus selected from the group consisting of Actinomyces, Actinomadura, Streptomyces, or Micromonospora.

31. The method of claim 29, wherein the organism is Actinomadura sp. 21G792 (NRRL 30778).

32. A biologically pure culture of Actinomadura sp. 21G792 (NRRL 30778) capable of producing an apoprotein having SEQ ID NO:150.

33. A method of making a chromoprotein comprising incubating Actinomadura sp. 21G792 (NRRL 30778) in a culture medium under conditions suitable for expression of the chromoprotein and recovering the chromoprotein from the culture medium.

34. A method of making a modified chromoprotein comprising:
a) subjecting a plurality of first polynucleotides comprising a selected orf of Actinomadura sp. 21G792 to simultaneous mutagenesis so as to produce a plurality of progeny polynucleotides;
b) expressing polypeptides from the progeny polynucleotides in host cells that produce an enediyne chromophore; and
c) selecting or screening the host cells for polypeptide/chromophore complexes having a desired characteristic, thereby identifying a modified chromoprotein.

35. The method of claim 34, wherein the first off is selected from the group consisting of orf15, orf19, orf20, orf32, orf33, and orf40.

36. The method of claim 34, wherein the first off is orf23.

37. The method of claim 34, wherein (a) further comprises subjecting a plurality of second polynucleotides comprising a second selected off of Actinomadura sp. 21G792 to simultaneous mutagenesis so as to produce a plurality of progeny polynucleotides.

38. The method of claim 35, wherein the second off is selected from the group consisting of orf15, orf19, orf20, orf23, orf32, orf33, and orf40.

39. The method of claim 38, wherein the first off or the second off is orf23.

40. The method of claim 34, wherein the desired characteristic is inactivation of at least one chromophore biosynthetic enzyme.

41. The method of claim 40, wherein Orf32 is inactivated.

42. The method of claim 41, which further comprises culturing the host cell in a fermentation broth comprising a benzoic acid analog.

43. The method of claim 34, wherein the host cell is Actinomadura sp. 21G792 (NRRL 30778).

44. The method of claim 34, wherein the host cell is a heterologous host cell.

45. A method of inhibiting progression of a neoplastic disease in a mammal comprising administering to the mammal an effective amount of the chromoprotein of Actinomadura sp. 21G792 (NRRL 30778).

46. The method of claim 45, wherein the neoplastic disease is selected from the group consisting of colon cancer, breast cancer, melanoma, head and neck cancer, and prostate cancer.

47. A pharmaceutical composition comprising an effective amount of the chromoprotein of claim 23 and a pharmaceutically acceptable carrier.

48. A compound having the formula: [chemical structure]
wherein R¹ is OH or OCH₃; R² is Cl or H; R³ is CH₃ or H; R⁴ is selected from NH₂, R⁵ and R⁶;
wherein R⁵ is [chemical structure]
and R⁶ is

[chemical structure]

49. The compound of claim 48, wherein R¹ is OCH₃, R² is Cl, R³ is CH₃, and R₄ is R⁵.

50. The compound of claim 48, wherein R¹ is OCH₃, R² is H, R³ is CH₃, and R⁴ is R⁵.

51. The compound of claim 48, wherein R¹ is OCH₃, R² is Cl, R³ is H, and R⁴ is R⁵.

52. The compound of claim 48, wherein R¹ is OCH₃, R² is Cl, R³ is CH₃, and R⁴ is NH₂.

53. The compound of claim 48, wherein R¹ is OCH₃, R² is Cl, R³ is CH₃, and R⁴ is R⁶.

54. The compound of claim 48, wherein R¹ is OCH₃, R² is H, R³ is H, and R⁴ is R⁵.

55. The compound of claim 48, wherein R¹ is OCH₃, R² is H, R³ is H, and R⁴ is NH₂.

56. The compound of claim 48, wherein R¹ is OCH₃, R² is H, R³ is H, and R⁴ is R⁶.

57. The compound of claim 48, wherein R¹ is OCH₃, R² is Cl, R³ is H, and R⁴ is NH₂.

58. The compound of claim 48, wherein R¹ is OCH₃, R² is Cl, R³ is H, and R⁴ is R⁶.

59. The compound of claim 48, wherein R¹ is OCH₃, R² is H, R³ is CH₃, and R⁴ is NH₂.

60. The compound of claim 48, wherein R¹ is OCH₃, R² is H, R³ is CH₃, and R⁴ is R⁶.

61. The compound of claim 48, wherein R¹ is OH, R² is Cl, R³ is CH₃, and R⁴ is R⁵.

62. The compound of claim 48, wherein R¹ is OH, R² is H; R³ is CH₃, and R⁴ is R⁵.

63. The compound of claim 48, wherein R¹ is OH, R² is Cl, R³ is H, and R⁴ is R⁵.

64. The compound of claim 48, wherein R¹ is OH, R² is Cl, R³ is CH₃, and R⁴ is NH₂.

65. The compound of claim 48, wherein R¹ is OH, R² is Cl, R³ is CH₃, and R⁴ is R⁶.

66. The compound of claim 48, wherein R¹ is OH, R² is H, R³ is H, and R⁴ is R⁵.

67. The compound of claim 48, wherein R¹ is OH, R² is H, R³ is H, and R⁴ is NH₂.

68. The compound of claim 48, wherein R¹ is OH, R² is H, R³ is H, and R⁴ is R⁶.

69. The compound of claim 48, wherein R¹ is OH, R² is Cl, R³ is H, and R⁴ is NH₂.

70. The compound of claim 48, wherein R¹ is OH, R² is Cl, R³ is H, and R⁴ is R⁶.

71. The compound of claim 48, wherein R¹ is OH, R² is H, R³ is CH₃, and R⁴ is NH₂.

72. The compound of claim 48, wherein R¹ is OH, R² is H, R³ is CH₃, and R⁴ is R⁶.

73. A compound having the formula: [chemical structure]
wherein R¹ is OH or OCH₃; R² is Cl or H; R³ is CH₃ or H; R⁴ is selected from R⁷ and R⁸;
wherein R⁷ is [chemical structure]
and R⁸ is [chemical structure]
and wherein R^{1′} is H, CH₃, OH, OCH₃, Cl, C₃H₇, or NO₂; R^{2′} is H, CH₃, NH₂, OH, F, OCH₃, F, Cl, NO₂, OC₂H₅, or NC₂H₆; R^{3′} is H, CH₃, Cl, CH₃, NH₂, OH, F, COH, OCH₃, Cl, OC₂H₅, or NO₂; and R^{4′} is H, OH, or OCH₃.

74. The compound of claim 73, wherein R^{1′} is CH₃, R^{2′} is H, R^{3′} is CH₃, and R^{4′} is H.

75. The compound of claim 73, wherein R^{1′} is CH₃, R^{2′} is OH, R^{3′} is H, and R^{4′} is H.

76. The compound of claim 73, wherein R^{1′} is H, R^{2′} is CH₃, R^{3′} is H, and R^{4′} is OH.

77. The compound of claim 73, wherein R^{1′} is H, R^{2′} is OH, R^{3′} is OH, and R^{4′} is H.

78. The compound of claim 73, wherein R^{1′} is H, R^{2′} is OH, R^{3′} is H, and R^{4′} is OH.

79. The compound of claim 73, wherein R^{1′} is OH, R^{2′} is OH, R^{3′} is H, and R^{4′} is H.

The application's sequence listing, which the Patent Office published only in electronic form, follows.

SEQUENCE LISTING (176 sequences)

SEQ ID NO: 1 - DNA, 1389 bp, Actinomadura sp. 21G792
  CDS (1)..(1389)
gcccgtgtcatcggcccggtcgtcgacgtggagttccccgccgacgccatcccggagatctacaacgccctccacgtggaggcgaacatcggtggcgacacccagaccctgacgatggaggtcgcgcagcacctcggcgacaacatggtccgggccatctcgatgaagcccaccgacggcgtcgtccgcggcgcgcccgtcgtcgacaccggcgagccgatctcggttccggtcggcgacgtcaccaaggggcacgtgtggaacgccctcggtgagacgctggacgtcccgacggcctcccttcaggtcaacgagcgctggggcatccaccgcaaggcgccggcgttcgaccagttggagtcccggaccgagatgctggagaccggcatcaaggtcatcgacctcctctgcccgtacgtcaagggcgggaagatcggcctgttcggcggcgccggtgtgggcaagaccgtcctcatccaggagatgatccggcgtgtcgcccgcaacttcggcggcacctcggtgttcgcgggcgtcggcgagcgcacccgtgagggcaacgacctctgggtggagatggaagaggcggacgtcctcaaggacaccgcgctcgtgttcggccagatggacgagccgccgggcacccgtctgcgggtcgcgctgtcggcgctgacgatggccgagtacttccgcgacgtccagaaccaggacgtgctgctgttcgtcgacaacatcttccggttcacccaggccggttcggaggtctccacgctgctcgggcgcatgccgtccgcggtgggctaccagccgaccctggcggacgagatgggtgtgctccaggagcggatcacctcgacgcgcggtcactcgatcacctcgatgcaggcgatctacgtgcccgccgacgacatcaccgacccggcgccgcacaccacgttcgcgcacctggacgccaccacgacgctctcccgggccatcaccgagaagggcatctacccggcggtcgacccgctcgactcctcctcgcggatcatggacccgcaggtgctggggaacgagcactacgaggtcgcccaggaggtgaagcggatcctgcagaagtacaaggagctgcaggacatcatcgccatcctcggtatcgacgagctctccgaagaggacaaggtcaccgtccagcgggcgcggcgcatcgagcgtttcctgtcgcacccgatgtacgtggccgagcagttcaccggccagcccggtgtgacggtgccgaaggacgagacggtcgcgtccttcaaggccatcgcggagggcaagtacgacagcatccccgagcaggcgttcttcatgtgcggcggcatcgaggacgtcgagaagaaggccaaggagctggagaagtag

SEQ ID NO: 2 - protein, 462 aa, Actinomadura sp. 21G792
ARVIGPVVDVEFPADAIPEIYNALHVEANIGGDTQTLTMEVAQHLGDNMVRAISMKPTDGVVRGAPVVDTGEPISVPVGDVTKGHVWNALGETLDVPTASLQVNERWGIHRKAPAFDQLESRTEMLETGIKVIDLLCPYVKGGKIGLFGGAGVGKTVLIQEMIRRVARNFGGTSVFAGVGERTREGNDLWVEMEEADVLKDTALVFGQMDEPPGTRLRVALSALTMAEYFRDVQNQDVLLFVDNIFRFTQAGSEVSTLLGRMPSAVGYQPTLADEMGVLQERITSTRGHSITSMQAIYVPADDITDPAPHTTFAHLDATTTLSRAITEKGIYPAVDPLDSSSRIMDPQVLGNEHYEVAQEVKRILQKYKELQDIIAILGIDELSEEDKVTVQRARRIERFLSHPMYVAEQFTGQPGVTVPKDETVASFKAIAEGKYDSIPEQAFFMCGGIEDVEKKAKELEK

SEQ ID NO: 3 - DNA, 387 bp, Actinomadura sp. 21G792
  CDS (1)..(387)
gtggcaaccctgaaggtcgggctcgtctcgccggagcgcgagatctggtccggcgatgccaagatggtggtcgcgcagaccatcgagggctcgctcggcatcctgccggggcacgctccggtgctcggcgtcctcctcgacggcagcgtggtcaagatcgagcccgccgatggcggcgagccggtcaccgcgatggtcggcagcggcttcttctccgtcgcggccgacgaggtgtcggtgctggccgagcaggccgagctgagccacgaggtcgacgtcgaggacgcgcggcgcgcgctcgaggcggcggaggcgtccgccgacgaggacacgacggcggagcggcgggcccgcgcgcggctgcgcgcggcgggcgtcgaagcctag

SEQ ID NO: 4 - protein, 128 aa, Actinomadura sp. 21G792
VATLKVGLVSPEREIWSGDAKMVVAQTIEGSLGILPGHAPVLGVLLDGSVVKIEPADGGEPVTAMVGSGFFSVAADEVSVLAEQAELSHEVDVEDARRALEAAEASADEDTTAERRARARLRAAGVEA

SEQ ID NO: 5 - DNA, 456 bp, Actinomadura sp. 21G792
  CDS (1)..(456)
gtggcactggacgtcggcgcggtgctcgccgccctcgccgcggtgtgcgcgctcgtcttcctcgcgatggcggtacgccgccgcctgttcgtgcgcggcggcggcgcggtcgagtgcagcctgcgggagctgccggccgaggagggcggcgccccgggggtgtggcgcctgggcatcggccgctacaaaggcgatgtcctgcactggcaccgcgtgttcggactcagcagaaggccccggcaggtgatccaccgccggggcctcgtcgtgtccaaccgcaggcccccggggccggaggaggccgagggcctgctgccggacgtgagcgtcatcgaggtccgcgacggcgacctgaccgtcgagctggcgatgggcgcgtccgcgctgaccgggttcctggcgtggctggaggccgcaccgcccggcttcccggtggacctccacgtccccgagtag

SEQ ID NO: 6 - protein, 151 aa, Actinomadura sp. 21G792
VALDVGAVLAALAAVCALVFLAMAVRRRLFVRGGGAVECSLRELPAEEGGAPGVWRLGIGRYKGDVLHWHRVFGLSRRPRQVIHRRGLVVSNRRPPGPEEAEGLLPDVSVIEVRDGDLTVELAMGASALTGFLAWLEAAPPGFPVDLHVPE

SEQ ID NO: 7 - DNA, 1599 bp, Actinomadura sp. 21G792
  CDS (1)..(1599)
gtgcgcaagctgctcagtggttcggccgtggcgctgcccgccgcgaccgtgttcctcctggcgctgtccgccgtgccgccggccggtgccgctcccgccgctccggtcgcgctcgtcggtccgggggcggcgcccgaccgtcccgacctcgccgagctggtgacgatcgaggacgtgcggcggcatctggaggcgttccagcagatcggcgactacaacggcggcaaccgcgcgtccggcacgcccgggtacgagatctcggtgaagtacgtcgtcgggcggctgcgcaaggcggggttctcgccgaccgtgcagaagttcacctacccgtactggacggagcgttcggtcgcggtgatgtcgcgagcggcaggcgagggcaagggcaagggcaaaaccaaggacaagggcaaggacaaggcgtacgtggcgggcctggacttcgccacgatgatgtactccggttccggggacgtcaccgcccgcgtgatccccgtggacgtcccggccaagggcgcggagggcaccagcgggtgcgagaaggcggacttcaaaggcttcgccaagggctcgatcgcgctgatgcagcgcgggaaatgcacgttcgagacgaaggcggcgcgcgcgcggtccgccggtgcggctgcggcgatcatctacaacaagcccggtgagaagggcccgatcgacgggacgctcgacaagccggcgaagctgccggtggtgggcgcgagccgcgaggtcggcgccgagctggtgaaggcggcggccaagggcggcctgacgatgcgggtgaagaccgacaccgagcacggtgagcggtcgtccagcaacgtcatcgtcgacacgaagcagggacgtgccgacaacgtggtggtcgtgggggcgcacctcgacagcgtgcaggacgggccgggcctcaacgacaacgcgaccgggtcggccgcgctgctcgcggtcgcggaggagatcggcgcgctcggtgaggacgggctgcggaaccgggtgcggttcgcctggtggggcgccgaggaggaggggctgcacggttcgacgcactacgtcgagaagatggacccgtccgaccggcggaacatcgcggtgaacctcaacttcgacatgctcggctcgccgaacgggatccgcgccgtgtacgacggcgaccactcgctcggccagggcaccaccccgccggccggttcggcggcgatcgagaagatgttccgcgagtactacagggcgcgcgacctgccgaccgccgaggccgtcttcaacgggcgctcggactacggcccgttcatcgaccacgacatcccggccgggggcctcgccaccggtgcggacggcgtcaagacggcggccgaggcgaaggcgtacggggggcgcgcgggcaagacctacgacccgtgctaccacgcgaagtgcgaccggatgaagaatgtgaacatgaagctgctggacacgaacgtcgacggcgtcgcgcacgtcacgcagctgctcgcggccagcacggtcgcggtgaacggcgacgcccggctgctgccggcggcggtcgacgcggcgggcccgctgtggagcggcggtcacctgatccgctga

SEQ ID NO: 8 - protein, 532 aa, Actinomadura sp. 21G792
VRKLLSGSAVALPAATVFLLALSAVPPAGAAPAAPVALVGPGAAPDRPDLAELVTIEDVRRHLEAFQQIGDYNGGNRASGTPGYEISVKYVVGRLRKAGFSPTVQKFTYPYWTERSVAVMSRAAGEGKGKGKTKDKGKDKAYVAGLDFATMMYSGSGDVTARVIPVDVPAKGAEGTSGCEKADFKGFAKGSIALMQRGKCTFETKAARARSAGAAAAIIYNKPGEKGPIDGTLDKPAKLPVVGASREVGAELVKAAAKGGLTMRVKTDTEHGERSSSNVIVDTKQGRADNVVVVGAHLDSVQDGPGLNDNATGSAALLAVAEEIGALGEDGLRNRVRFAWWGAEEEGLHGSTHYVEKMDPSDRRNIAVNLNFDMLGSPNGIRAVYDGDHSLGQGTTPPAGSAAIEKMFREYYRARDLPTAEAVFNGRSDYGPFIDHDIPAGGLATGADGVKTAAEAKAYGGRAGKTYDPCYHAKCDRMKNVNMKLLDTNVDGVAHVTQLLAASTVAVNGDARLLPAAVDAAGPLWSGGHLIR

SEQ ID NO: 9 - DNA, 636 bp, Actinomadura sp. 21G792
  CDS (1)..(636)
gtggccgacatggcgaagaacagggagaaccccgtcgtcctgtcccggatctacacccgtacgggcgatgaagggacgaccgcgctcggcgacgcgtcccgcacccgcaagaccgacccgcgcctggccgcctacgccgacgtggaggaggccaacgccgcgatcggcgccgcgctctccctcggctccctgcccgcggacgtcgcggcgctcctcgtccgcgtgcagaacgagatgttcgacgtcggcgcggacctgtgcgcaccggtcgtcccggatcccgagtacccgcccctgcgcatcgagccgtcctacatcgagcggctcgaggccgactgcgacgagcagaacgagaagctgcggccgctgcgcagcttcatcctgccgggcggggcccccggcgccgcgctgctgcacgtcgcgcggaccgtcgcgcggcgcgccgaacgcaccgcgtgggcggcggtcgaggcgcacggcaccgccgccgtgggcgaccccgaggccaccgagggcggcgtcaacccgctggccgtgcagtacctcaaccgcctgtcggacctgctgttcatcctctgcagggtcgcgaacgccgagcacggcgacatcctgtggaagcccggcggcgagcgctag

SEQ ID NO: 10 - protein, 211 aa, Actinomadura sp. 21G792
VADMAKNRENPVVLSRIYTRTGDEGTTALGDASRTRKTDPRLAAYADVEEANAAIGAALSLGSLPADVAALLVRVQNEMFDVGADLCAPVVPDPEYPPLRIEPSYIERLEADCDEQNEKLRPLRSFILPGGAPGAALLHVARTVARRAERTAWAAVEAHGTAAVGDPEATEGGVNPLAVQYLNRLSDLLFILCRVANAEHGDILWKPGGER

SEQ ID NO: 11 - DNA, 1578 bp, Actinomadura sp. 21G792
  CDS (1)..(1578)
gtgtacgactacatcatcgtgggtgcgggcagcgccggatgcgtgctggccgcccggctgaccgaggacccgtcggtcacggtgctgctgctggaggcgggcccgcccgacgacgcccccgagatccgcattccggccgccgtcgcgtcgctgatcaagggcccgtacgactgggactacgcgaccgtcccgcaggagcacgccgccggacgcagcgtgtactggccgcgcgggcggacgctcggcggcagctcgtccaccaacgcgatgatctacatccggggttcccggcacgactacgacacctggcgggacgagcacggctgcgtcggctggggctacgaggacctgctgccgtacttccgcggctcgcaggaccagcagcgcggcgagaccccgtaccacggcgtcggcggcccgctccgcgtcgaggacctgcggttcaagcacccgctcacgcaggcgtgggtgaagtcggcgaaggcgcacgggctcgccgccaatcccgacttcaacggcgccgaccaggacggcgtcggcttctaccaggtcacgcacaagcgcgggcgccgctggtcggcggccgacgcgtacctgcacccgaacgagtaccgcccgaacctgaccgtcgtcaccgacgcgctcgcgacccgcgtcctgatcgaggacggacgcgcggcgggcgtggcgtacgaggcgcgcgggaagtcgctgaccgcgcgggcgaacgccgaggtcgtcctgtccggtggggcggtgaacagcccgcagctcctcatgctctcgggcgtcgggcccgccgaccatctccgcgagcacggcatcgacgtgctcgtcgactccccggtcggccggaacctgcaagaccatccgttcgtgaacgtcatgttcgccacgccccggaccaagaacctctgggagcaggccaacccgctcacgttcgcgctgcacgccgctctggggcgcggcccgtacgcgtcgaacgtcgccgaggcgggcgggttcgtccggacggccgaggggctccccgccccggacctgcagtaccacgtgctgccgaccccgttcatcgaccaggggctcgtcgagccgtcccagcggctcctgtcggtcatggtcacggcgatcgcggtccagagccggggcgcgctcacgctccggtcggcgaacccacacgccaagccgctgatcgaccccgcgtacctctccgcggaggccgacctcgacatcctggtggccggggtgaagcaggcccgcgcgatcgccgacacgggcccgctcgcgtccctgctcggcggcgagttcgcgcccggcgagcaggtgtccgacgacgcggcggtcgtcgagttcgtccgccgggagtgcgcgacgctcttccacccgacgagcacgtgcgcgatgggcgcggtcgtggacaccgagttgcgcgtgcggggggtcgacggcctgcgcgtggtggacgcgtccgtcatgccgtcggtcccgcgcggcaacacgggcgccccgacgatcgcgatcgccgagcgggcgtccgatctcatccgcggcaggaccccgctcaagcccgcgaacgcctga

SEQ ID NO: 12 - protein, 525 aa, Actinomadura sp. 21G792
VYDYIIVGAGSAGCVLAARLTEDPSVTVLLLEAGPPDDAPEIRIPAAVASLIKGPYDWDYATVPQEHAAGRSVYWPRGRTLGGSSSTNAMIYIRGSRHDYDTWRDEHGCVGWGYEDLLPYFRGSQDQQRGETPYHGVGGPLRVEDLRFKHPLTQAWVKSAKAHGLAANPDFNGADQDGVGFYQVTHKRGRRWSAADAYLHPNEYRPNLTVVTDALATRVLIEDGRAAGVAYEARGKSLTARANAEVVLSGGAVNSPQLLMLSGVGPADHLREHGIDVLVDSPVGRNLQDHPFVNVMFATPRTKNLWEQANPLTFALHAALGRGPYASNVAEAGGFVRTAEGLPAPDLQYHVLPTPFIDQGLVEPSQRLLSVMVTAIAVQSRGALTLRSANPHAKPLIDPAYLSAEADLDILVAGVKQARAIADTGPLASLLGGEFAPGEQVSDDAAVVEFVRRECATLFHPTSTCAMGAVVDTELRVRGVDGLRVVDASVMPSVPRGNTGAPTIAIAERASDLIRGRTPLKPANA

SEQ ID NO: 13 - DNA, 207 bp, Actinomadura sp. 21G792
  CDS (1)..(207)
gtgcgcgtcgcgcgccgggcgcgtacagcctgcgggcgtcaccgcttgagggccttcgcgatccggacgcggcgggccttgcgggcctcggcccggcgccgccgtacgcggtcgtcgatgatgtcctgggtgatctccgggcggatcatggcttctcctcggttccgccgggccctcgtggcccgacacctacgaggttcgtcctaa

SEQ ID NO: 14 - protein, 68 aa, Actinomadura sp. 21G792
VRVARRARTACGRHRLRAFAIRTRRALRASARRRRTRSSMMSWVISGRIMASPRFRRALVARHLRGSS

SEQ ID NO: 15 - DNA, 489 bp, Actinomadura sp. 21G792
  CDS (1)..(489)
atggacggcggtcccgcaccggtgcgcagcgggtggcgggctccgctgcgcccggcgccgccgcccccggacggcttccgcccgttcacgcgcgccgacctgcccgccctcgccgccctcatgtgggacgcctaccggggcacccccgacgagggcgacgtcggtggccccgacggcgcgctgcgcgagctgcgccgaacgctggacggcgagtacgggacgttcctgcccggggcgtcgttcgtcgccgaaccggacggccgtcccgtcgccgccgccctcgtgaccgtctaccgggacgagccgctgctcgcgttcctgttcaccgcgccgtcgcacgcgggtcgggggctcgggcacgaactcgtcctggcggtcatgcacgtgctcgccgagcgcggccacgacaccctcaccctcgccgtgaccaggcgaaaccgccgcgcccgcctcctctaccaccgcctcggcttcgtcgaggtcggctga

SEQ ID NO: 16 - protein, 162 aa, Actinomadura sp. 21G792
MDGGPAPVRSGWRAPLRPAPPPPDGFRPFTRADLPALAALMWDAYRGTPDEGDVGGPDGALRELRRTLDGEYGTFLPGASFVAEPDGRPVAAALVTVYRDEPLLAFLFTAPSHAGRGLGHELVLAVMHVLAERGHDTLTLAVTRRNRRARLLYHRLGFVEVG

SEQ ID NO: 17 - DNA, 1497 bp, Actinomadura sp. 21G792
  CDS (1)..(1497)
gtggccacggagagcaacgagaagacgttcgcgtcactgaacccggcgaccgaggaggtcgtcgccgagtacccgatccacgacgagtccgccgtggccgccgcgatcgaccgggcccgggaggcgtcgcgctggtggggcgagctgggccggcgcgagcggcggctgcggctgctcaacgtcaagggcgcgctcgcccgcaacctcaaccggatggccgagatcatccaccaggagaccggcaagccggtcgccgacgcccaactcgagacgatcatggcgatctcgcacctggactgggcggcgcgcaacgcccagaaggtgctcgggccgcgcaccgtcttcccgggcatgatggcgatcaaccagaagtgcacgctggagtaccagccgctcggcgtcgtcggcgtcatcggcccctggaactacccgatcttcaccccgatcggctcgatcgcgtacgcgctcgccgccgggaacgccgtcgtcttcaagccgtccgagttcaccccgggcgtcggcgcctacctcgccgaactcgtcgccggcgtcgtccccgagcacccgatcctccaggtcgtgaccgggtacggcgcgacgggcgcggcgctcgcctcatccccccacatcggcaagctcgcgttcaccggctcggcgggcaccgccaagaaggtgatggccgcgtgcgccgagaacctcaccccgatcgtggccgagtgcggcggcaaggacgcctgcatcgtcgacgccgacgccgacctcgacgccgccgccgacgccgcgctgtggggcgcgatgtccaacgccgggcagacctgcatcggcgtcgagcggatctacgtcgtcgaccgcgcctacgacgccttcctcggcaagctcaccgacaaggcccgcgagctgcgtcccggcttcgaccgcgaggccgcctacggcccgatcacgatgcccggccagctggagatcatcgagcggcacatcaaggacgccatcgaccggggcggcaaggccgtcgtcggcgggcccgagtccgtccgcaagccctacgtggagccggtcgtcctcaccgacgtcccggacgactcgtccgccgtctgcgaggagacgttcggcccgacgatcaccgtccaccgcgtcgcgtcgctcgacgaggccgtcgagaaggccaaccgcaccgcctacggcctggccgggacgatcttctccggcaacaaggcccgcgcgatggaggcggcccgcacgatgcgctccggcatgacctcgatcaacgcgttcgccgcgttcgcgcaggtcgccgcgctgccgttcggcggcgtcggggagtcgggcttcggccgcatccacggcgcggacgggctgcgcgagttcgcccgcccgaaggcgatcacccggcagcggttcacgaccatgaacctgacgtcgttcgcccgctccgacaaggagatggcgcgcgtcctcggcctcatcaacatgctgcacggcaagcactacaagaggtga

SEQ ID NO: 18 - protein, 498 aa, Actinomadura sp. 21G792
VATESNEKTFASLNPATEEVVAEYPIHDESAVAAAIDRAREASRWWGELGRRERRLRLLNVKGALARNLNRMAEIIHQETGKPVADAQLETIMAISHLDWAARNAQKVLGPRTVFPGMMAINQKCTLEYQPLGVVGVIGPWNYPIFTPIGSIAYALAAGNAVVFKPSEFTPGVGAYLAELVAGVVPEHPILQVVTGYGATGAALASSPHIGKLAFTGSAGTAKKVMAACAENLTPIVAECGGKDACIVDADADLDAAADAALWGAMSNAGQTCIGVERIYVVDRAYDAFLGKLTDKARELRPGFDREAAYGPITMPGQLEIIERHIKDAIDRGGKAVVGGPESVRKPYVEPVVLTDVPDDSSAVCEETFGPTITVHRVASLDEAVEKANRTAYGLAGTIFSGNKARAMEAARTMRSGMTSINAFAAFAQVAALPFGGVGESGFGRIHGADGLREFARPKAITRQRFTTMNLTSFARSDKEMARVLGLINMLHGKHYKR

SEQ ID NO: 19 - DNA, 996 bp, Actinomadura sp. 21G792
  CDS (1)..(996)
atgtccactctcctcggaactctgcgcaggaccgtgctcgccccgtccctggacgaggtgacgttcgcgcggcgcggcttcccctccgggcccgcgggcccggcgacgcggaagctggaggccatcccgcagtcggtggtctgcggcttcgagtggggcatcgagatccgcggtctggcggagctggagcggcggctggagttcgtgacgccggagctgcgggggttcgcctacgagggcgcgacgatggcctgcacgatccgcgacgcgatgcgcgccgggcgggggcaccgcacccgcgacctcctgcgggggccgggccgtccgcacatcttcctctcctacatcggcatcgggttcgccatggcgcggctgccgcggatcctgtggaagagcgtgctgccggacctgcccggcgcggcctactacccggcgatgacctggctggcggtcgacggctacggcttcgacctggcctacttccacaccgaccggtgggtgggacgccaggaggtgcccgcgccctacccgtgggagggcgcgcccgactacttcccgcgcgccgtcgaccaggggatcggccgggccctgtggttcatctgcggcggccgcgcgcccgaggtcgccgccgccgtccgccgcttcgccgcgcaccggcacgccgacctgtggagcggggtcggcctggccgccgcgttcgccgggggcgggacggccgagggcctggcggtgctgcgccgcgaggcgggcgagcaccggcccgagctcgcgcagggcgtcgtgttcgccgtcaaggcccgctcgtacgccgggcacgtgcccgcgcacaccggaaccacggtcgccgcgctcgcggacgtgaccgtcgacgcggcggtcgcgctggccgacgacgccgaggccggtaccggacgcgcgcgtccggtaccggcctacgagctgtggcgggggaacgtgcgcgcccacttcgcccgcctggagcgggccgccgggtga

SEQ ID NO: 20 - protein, 331 aa, Actinomadura sp. 21G792
MSTLLGTLRRTVLAPSLDEVTFARRGFPSGPAGPATRKLEAIPQSVVCGFEWGIEIRGLAELERRLEFVTPELRGFAYEGATMACTIRDAMRAGRGHRTRDLLRGPGRPHIFLSYIGIGFAMARLPRILWKSVLPDLPGAAYYPAMTWLAVDGYGFDLAYFHTDRWVGRQEVPAPYPWEGAPDYFPRAVDQGIGRALWFICGGRAPEVAAAVRRFAAHRHADLWSGVGLAAAFAGGGTAEGLAVLRREAGEHRPELAQGVVFAVKARSYAGHVPAHTGTTVAALADVTVDAAVALADDAEAGTGRARPVPAYELWRGNVRAHFARLERAAG

SEQ ID NO: 21 - DNA, 903 bp, Actinomadura sp. 21G792
  CDS (1)..(903)
gtgaagaacgccgccggccgggaggtactggagacggtcggcgagagtttcctggcggggttcggccacgccgtcgaatcgggtgcaccggacgagatcccggggctgctccggcccgtcccgacgcggtaccgggggttcgcgttcgagggcgcggcgatgggtttcgcgacggtcgacgcgctgacgttcgcgcgcggccggcggacggacgcgtacctgcggggaacgggcgacccgcacgtctacatggcctacatcggggtcggctgggcgatggcgcggctgccgaggttccgctggccgaagccgcccgcggaccccctcatgcggtggttcccgctcgacgggtacggcttccaccaggcgtacttcaagaccgaccagtacgtccaccggcactaccgggcggcccggttcccctggccggcgcacgacccgcacggctacgccgaccgcgccctcgaccagggcatcgggcgcgcactgtggttcgtcggcggcacggacgccgacgtggtggccgggctgatcgagggcttcgcccccgaccggcggtccgacctgtactcgggcgccgggctggccgccacctacgcgggcggcgcggacgaggacgagctgcgcgggttctggaagcgcgcgggcgagcaccgcccgttcgtcgcgcagggcagcgcgttcgcggcggaggcccggcggcgcgccggactggagacgccgcacacggagatcgggacgcgggtcttctgcgacatggaccccgaccgggccgcgcaggtctgcgtcgaggcgcggcccggacgcgaggaggcgctggaagaggacgggggcgctcagcccgcgttcgaggtgtggcggcggcgcatcgccgacgagttcgcagcgaaggggaggtgctag

SEQ ID NO: 22 - protein, 300 aa, Actinomadura sp. 21G792
VKNAAGREVLETVGESFLAGFGHAVESGAPDEIPGLLRPVPTRYRGFAFEGAAMGFATVDALTFARGRRTDAYLRGTGDPHVYMAYIGVGWAMARLPRFRWPKPPADPLMRWFPLDGYGFHQAYFKTDQYVHRHYRAARFPWPAHDPHGYADRALDQGIGRALWFVGGTDADVVAGLIEGFAPDRRSDLYSGAGLAATYAGGADEDELRGFWKRAGEHRPFVAQGSAFAAEARRRAGLETPHTEIGTRVFCDMDPDRAAQVCVEARPGREEALEEDGGAQPAFEVWRRRIADEFAAKGRC

SEQ ID NO: 23 - DNA, 2037 bp, Actinomadura sp. 21G792
  CDS (1)..(2037)
gtgtccgcgagctatggctggctgcgcaagcagctaccgggcgttgtggcgctcgtactggtggtcggggcgttcttcgtggtcaagctgcccgaggcgcccgccgccgagaaggccgatgtggcggcccggtacgggttcgagccgatgagcatcgcgatgccgggcggcttcgcgcagcagacgatccgcgaggtcaacaaggactacgagaacatcgacgcctggatctcctccgtcggagccggcgtcgcgatgaacgacctcgacggcgacgggctgcccaacgacctgtgcatcaccgatccgcggatcgacagggtcgtggtgaccccggctccgggcgcccgctcggaccggtacgcgtcgttcgcgctggagaccggcccgctgccgatgaacgacgcgatggccccgatggggtgcgcccccggcgacttcaacgaggacggccggatggacctgctggtctacatgtggggccgcaccccgatcgtccatctcgcccgcgcggacgccgagaagctgacggcggacgcgtacgtcccgaccgagctggtgccgaacgcgggcggccgggcctacacggggccgcagtggaactccaacgccgtggcgatcgacgacttcgacggcgacggccactacgacatctacctggggaactacttcccgcacggtcccgtgctcgatccccgcaagagcggcggcgtcgagatgaaccggtcgctgtcgaacgcgaccaacgccggggaggactacttcttccgctggacgggcgccaccgccggtgaacgtccgtcggtcgagttcgagcagctcgacgacgtgctcccgcgcgagatctccaagggctgggtgctggcggccggggcgaacgacctcgacggcgaccagcgccccgagctctacatcgcccaggaccacggcaaggacgccctcctctacaacatttccactcccggaaagatcgaattccaggccgtgcacggggcccgcactccgggcctgccgaagtcgctgcggatcggcgacgattccttcaagggtatgggaatcgatttcgccgatttcaatcacgacggcctgtacgacatgttcgtcagcaacatcacgacgacgttcggcatccaggagagcaatctccatttctacaacaccgcgaagaaccaggccgatctccggaccaggctgcgtgacggagacgcgccgtggacggaccgcagcgccgacaagggcaccgcgtggtccggctgggcctgggacgtcaaggtgggcgacttcgacaacagcggcgaccccgccatcgcccagaccaacgggttcgtcaagggcgaggtgaaccggtggccccagctgcaggaactcgccgcctccaacgacctggtcgtggaggacccgcgctggtggccgcacgtgcgggccggtgacgacatcgccggcagccagcggctgaccttctgggccccggacgacgacggcgggtacgtgaacgtgtccgacgagctcggcctggccatcccggtgcccacccgcgggatcgcggtcggcgacgccgacggcgacggccggctcgacatggccgtggcccgccagtgggaggagcccgtcttctaccacaacaccgccccgtcgccgggcgcccacctcaacctgcggctgacgcacgacaccgaggacggcgactccggatcgggcggctccgagccggccgagggcgcgctgcccgcgccgggcagcccggtcgtcggcgcgcaggtgaaggtcaccaccccggacgggcgcgcgcacctggcccgggtggacggcggcagcggccactccggcaagcgcagcgacgaggtgcacatcggcctgggcgcgggggtcaccggccccgtgcgggtcgagctgtgctggcgggaccgctcgggcacggagcaccgccaggagctgcggctcgcccccggccggcactcgctacggctcggcgccggcgccgaagtcgtccggcccgaccagccccaggacacgcagaccccggccgaggaggaatga

SEQ ID NO: 24 - protein, 678 aa, Actinomadura sp. 21G792
VSASYGWLRKQLPGVVALVLVVGAFFVVKLPEAPAAEKADVAARYGFEPMSIAMPGGFAQQTIREVNKDYENIDAWISSVGAGVAMNDLDGDGLPNDLCITDPRIDRVVVTPAPGARSDRYASFALETGPLPMNDAMAPMGCAPGDFNEDGRMDLLVYMWGRTPIVHLARADAEKLTADAYVPTELVPNAGGRAYTGPQWNSNAVAIDDFDGDGHYDIYLGNYFPHGPVLDPRKSGGVEMNRSLSNATNAGEDYFFRWTGATAGERPSVEFEQLDDVLPREISKGWVLAAGANDLDGDQRPELYIAQDHGKDALLYNISTPGKIEFQAVHGARTPGLPKSLRIGDDSFKGMGIDFADFNHDGLYDMFVSNITTTFGIQESNLHFYNTAKNQADLRTRLRDGDAPWTDRSADKGTAWSGWAWDVKVGDFDNSGDPAIAQTNGFVKGEVNRWPQLQELAASNDLVVEDPRWWPHVRAGDDIAGSQRLTFWAPDDDGGYVNVSDELGLAIPVPTRGIAVGDADGDGRLDMAVARQWEEPVFYHNTAPSPGAHLNLRLTHDTEDGDSGSGGSEPAEGALPAPGSPVVGAQVKVTTPDGRAHLARVDGGSGHSGKRSDEVHIGLGAGVTGPVRVELCWRDRSGTEHRQELRLAPGRHSLRLGAGAEVVRPDQPQDTQTPAEEE

SEQ ID NO: 25 - DNA, 993 bp, Actinomadura sp. 21G792
  CDS (1)..(993)
atgtccgagaccaaggcaaccccaccgcgtcacgacccgaaggtcgtcacggcgctgcgcaacttcgccatgtcgatgtcggtcttcaacatcctgggctacacgatcctcgggttcgagcagccgtggacctggccgttcatcgcgctggccaccgcgtacacgttcgaggccctgctggaggccatcggggccaaggtggagggccgcaccccccgcttcgcgggccgcggcttccgcggcgtcatggagttcctctacccggcgcacatcaccgccctggcgatgaacatgctgatctacgtcaatgaccgcgtgtgggtcatggtcttcggcgtgttggtcgcggtcggggccaagtgggtgctgcgggccccggtgcggggccgtatgcggcactacatgaacccgtcgaacttcggcatcaccgccatcctgctgctgttcccgtgggccagcatcgccccgccgtaccacttcaccgagcggttcgacgcccccgtcgactggctcgtcccggtgatcatcctgagcgcgggcacgatgctcaacgccaagctcaccgggcggatgtggctgatcatgggctggctctcgatctacgtcgtccaggccgtggtccgcggctggctgctggacacctcgatcccggcggcactgatcatgatgaccggcgtcgcgttcgtcctctacaccaactacatggtgaccgaccccggcaccagcccgtcggcgccggccgcgcagttcgccttcggcggcggcatcgcgatcatctacggcttcctcaccggggcgggcatcgcgtacggcctgttcttcgcgacggcgctcgtctgcctcatccgcggcgtctacctgtgggcgctgcacttctcgaacaaggcgcgcgaggaacgggcgacggccgaggccgccacccacgacgccgccgccaacggccggtccggtgccggacggcccgactccggcaaggaggtcgtgcccgcatga

SEQ ID NO: 26 - protein, 330 aa, Actinomadura sp. 21G792
MSETKATPPRHDPKVVTALRNFAMSMSVFNILGYTILGFEQPWTWPFIALATAYTFEALLEAIGAKVEGRTPRFAGRGFRGVMEFLYPAHITALAMNMLIYVNDRVWVMVFGVLVAVGAKWVLRAPVRGRMRHYMNPSNFGITAILLLFPWASIAPPYHFTERFDAPVDWLVPVIILSAGTMLNAKLTGRMWLIMGWLSIYVVQAVVRGWLLDTSIPAALIMMTGVAFVLYTNYMVTDPGTSPSAPAAQFAFGGGIAIIYGFLTGAGIAYGLFFATALVCLIRGVYLWALHFSNKAREERATAEAATHDAAANGRSGAGRPDSGKEVVPA

SEQ ID NO: 27 - DNA, 5835 bp, Actinomadura sp. 21G792
  CDS (1)..(5835)
atgagcagcacccgcctcgccgtcgtcggtgcggcatgccgctatccggacgcggcgtccccccgggagctctgggagaacgccctcgccgggcgccgcgcgttccgccggctgcccgacgagcggatgcggctggaggactactgggacgccgatcccgccgcccccgaccggttctacgccagcaaggccgccgtcatcgagggctacgagttcgaccgcgtcgcccaccgcatcgccggcagcacctaccgctccaccgacctcacccactggctggcgctcgacgtcgccggacgggcgctggccgacgcgggcttcccggagggccgggacctgccccgcgagcgcacgggggtgatcgtgggcaacaccctcaccggcgagttcacccgcgccaacgtgctgcggctgcgctggccgtacgtgcggcgcgtggtggccgccgggctccgcgagcaggaaggctgggacgacgaccggctgggcgcgttcctggacgacctggaggaggcgtacaaggaaccgttcccggccatcgacgaggactccctcgccggcggcctgtccaacaccatcgccggacgcgtctgcaaccacttcgacctcaagggcggcggctacacggtcgacggcgcgtgctcgtcctcgctgctgtcggtggccacggcctgccggtcgctgctcgaccgcgacatcgacgtcgcggtcgccggcggggtggacctgtccatcgacccgttcgagatcatcgggttcgccaagacgggcgcgctggcccgcggcgagatgcgcctctacgaccgccgctccaacggcttctggccgggggagggctgcggcatggtcgtgctgatgcgggaggaggacgcccgcgcccaggggcggcggatctacgcgaccgtcgccggctggggcgtctcgtccgacggccgcggcggcatcacccggccggaggccgacggctaccggctggcgctgagccgcgcgtacgagcgcgcgggcttcggcatcgacaccgtcgcgctgttcgaggggcacggcacgggcaccgaggtcggcgacacgaccgagctgacggcgctgtcgctggcccgccgggcggccgccccgcaggccgcgcccgccgcggtcggctccgtcaaggggatgatcgggcacaccaaggccgcggccggcgtggccgggctgatcaaggccgtgatggcggtccgcgaccaggtcctgccgccgaccaccggctgcgtcgacccgcacccgctgctcgcggacgacgacgcggcgctgcgggtgctgcgcaaggccgagccgtggcccgcggacgcgccggtgcgcgcgggcgtcaccgcgatgggcttcggcggcatcaacacccacatcgtgctggagggggcggacgagcgcaggcgcgtcccgttcgacacccgcacccgcgcgctggcggcgtcggtccaggacgccgaactgctgctggtcgacgccgactccgcggacgcgctgcgggccagggtcgcggaactggccgagttcgtgccgaaactggcgtacgcgcagctgtccgacctggccgccgtgctccagcgggacctgggcgaccggccgtaccgggccgccgtcgtggcctcctcgcctgagcacgcggaggcgcgcctccgccgggtgctggccgtgctggagtcgggggagagcggcctgcacgcccccgacggcggcgcgttcctcggccgggtgagcgggcggggccgcatcggcttcctgttccccggccagggctcgggcaccggcaccgccgggggcgcgctgcgccgccgcttcgccgaggtcgaggacgtctacctgcgggcgaagctgcccgagcggggcgacatgatcgccacgcacgtggcgcagccgcgcatcgtcaccggcgcgatggcggggctgcgggcgctgtccctgctgggcctggaggcggaggccgcggtcggccacagcctcggcgagctgtccgcgctgcactgggccggggcgatggacgaggacgcgctgctgcgcgtcgcgggggtgcgcggccggaccatggccgagcacagcgcgtccgggacgatggcgagcgccaggtgctccgccgccgaggcggcggcgctggtcggggaccgtccggtggtgatcgccggtcacaacggccccgcccagaccgtgctggccggttcggtcgaggacatcgaggcggtgggccgcgacgcggcggcgaacggggtcagctgggtgcgcctgccggtctcgcacgccttccactccccgctggtcgccccggccgccgacgccttcgcccgcgagctcgacggcgaacggttcgggccggtcggacggcgcgtggtgtcgaccgtcaccggcgacgggctggccgccggcgccgacgtccgggcgctgctgcgccgccagatcaccgacccggtgctgttcggccgggcggtggaggtcgcggccaaggacgtcgacctgttcgtgaaggtcggccccgggcgggtgctcaccgggctggccaccgacatcaccgaggtgcccgccgtcgcgatggacaccgacgacgagtcgctcggcgggttcctcaccgtgctcgccgccgcgtacgtgcgcggcgcgcccgtccggcacgaggtcctgttccacggcaggctggcccggcccctggagatcggggcggagttctccttcttcgcgagcccctgcgagacgccgccgccggtccgcatcaccgggacggcccgccggagcggccgagccgtcccggtaccggacgcgcctgcggacggtgcggcggccggcggtgcggaggccgacgcggcggagccctccatcgacctgctgcggcggctgctggccgagcgcgtggagctgccgcccgagatggtggccgacgacagcaggccgctggacgacctgcacctcagctcgatcaccgtcgggcaggtcgtgaaccaggcggtgcggctgcggggcctggcggtgacgcaggccccgaccaacttcgcgaccgccacgctccgcgagctggccgagacgctcgacacgctcgccgagaccgccctcccgggcgacctggagccgggttccgcggtcgcgggggccgccgcgtgggcgcgcgccttctccctcgacctcgacaccgaaccgctgcctcggcccgcgacgtccaccgccccctccctcgcggcgggcggcgccggcgggtggacggtccacgccaccgaagggcatccgctggccgggccgctccgcgacgcgctggagcgggcgggcgccggtcccggcgtcctggtctgcctgccccccgactgcaccgacgaccagctggaaccggccctggacggggtgcgggacgcgctggcgggcgcgccgggcacccggttcgtcctggtccaggacgggcgcggcgcggccgggctcgcccggaccctccgcctggaggcgccgcacctgcgcgtcacgatcgtgcacaccccgccgtccgcggacgccgtcgaccgggtcgtcgccgaggtggcggcgaccggggagttcgccgaggcgtactacggcgccgacggcgagcgccgcgtccccacgctgcgggcgatgcccgtgcgcgcggcgcgcggcgacccgccgctggactcctcggacgtgctgctggtgacgggcggcggcaaggggatcaccgcggagtgcgcgctcgccgtcgccgccgacaccggcgcccggctcgccgtgctcggccgctccgaccccgccgaggacgccgaactggcggcgaacctggcgcggatgtccgacgccggggcgaccgtccgctacgcccgcgccgacgtcgccgacccggtccgggtcgccgccgcggtcgcggagctgaccgagtcgctcggcccggtcaccggcgtcctgcacggggcgggacggaacgttccggccggtctcgccgggctggacatgccggagatccaccgcaccctcgcgcccaagacgggcgggctggaggcggtgctcgccgccgtcgaccccgcccggctgaagctgctcgtcacgttcggcagcatcatcggacgcgccgggctgcgcggggagggccactacgccaccgccaacgaccggctcgcgcagctgacccgcgagttcgccggccggcatccggactgccggacgctctgcatggagtggtcggtgtggtcgggcgtcggcatgggcgagcggctgtcggtggtcgagggcctcggccgcgagggcatcaccgccatcacccccgaccagggcgtcgagatcatgcggcggctcgtcgccgatccggacgccccgtccgtcgtggtgatcagcggccgcaccgggacgatcgacaccgtgcgccacgacgcgccggagctgccgctgctgcggttcacggggcggccgctcgtccggtaccacggcgtcgagctggtcgccgagaccgagctcaacgtcggctccgacccgtacctggccgaccacctgctggacgggaacctgctgttcccggccgtcctcgggatggaggcgatggcccaggcggcgtccgccgccaccggccgggaggagccgcccgccttcgagggggcggagttcctgcggccgatcgtcgtcccgcccgagggcagcaccacgatccgcgtcgccgcgaccgtcgtcgacgacggcgcggtccaggtcgcgatccgcacggccgacaccgacttcgccgccgaccacttcaccgcgcggctggtgtacccggacggaccgctcccggacggccccccggaccaggtcggcgacggcctgcccgaggtcccgctcgacccggccgcggacctgtacggcggcgtcctgttccagggcgcccgcttccagcggctgcgccggtaccaccgggccgcggcccggcacgtggacgccgacgtcgccgcggtccccgccgggggctggttcgccgggttcctgcccggcggcatgctgctggccgaccccggcatgcgggacgcgctgatgcacggcaaccaggtgtgcgtcccggacgcgaccctgctgccgtccggcgtcgaacggctgcggcccgcgggtcccggcgtcgtcggcgacctgcggtactgcgccaccgaacgggagcgggacggcgacacgtacgtgtacgacatcgccgtccgggacgcgaccggcgccgtcgtcgaacggtgggacgggctgcgcctccaggccgtccggaagggggacgggcgcgggccgtgggtgcccccgctgctcggctcgtacctggaacgtgaactggaggacctcctcggcgtgcacgtcgcggtcgccgtggagcccgacccgcccgccgaggcgaacggggggcggggcgaccggacggctgcggccgccgcccgcgcgagcggcggcgcggtgtccgtgcggcgccgcccggacggccgtcccgaactgggcgacggccggccggtctccgcctcgcacggttcgggcgtcaccctctgcgtcgtcgcggacgagcccggcgcgggcccgctcggctgcgacgtcgagacggtcgcggagcgggccccggcggactgggccgggctgctcggcgacgccgccgcgctggcgaaggtgatcgccgcggagcgcgacgagcggtacgcgaccgccgccacccgagtctgggcggcgatcgagagcgtccgcaaggcgggcctgccggccgacgccccgctgaccctcgcgccggccggcgccgggccgtgggtggtcgtggcctccggcggcctgcggatcgcgaccctcgtcaccgccctgcgggacgagccggacccggtcgtgctcgcggtactcgtggaaggacggtcgtaa

SEQ ID NO: 28 - protein, 1944 aa, Actinomadura sp. 21G792
MSSTRLAVVGAACRYPDAASPRELWENALAGRRAFRRLPDERMRLEDYWDADPAAPDRFYASKAAVIEGYEFDRVAHRIAGSTYRSTDLTHWLALDVAGRALADAGFPEGRDLPRERTGVIVGNTLTGEFTRANVLRLRWPYVRRVVAAGLREQEGWDDDRLGAFLDDLEEAYKEPFPAIDEDSLAGGLSNTIAGRVCNHFDLKGGGYTVDGACSSSLLSVATACRSLLDRDIDVAVAGGVDLSIDPFEIIGFAKTGALARGEMRLYDRRSNGFWPGEGCGMVVLMREEDARAQGRRIYATVAGWGVSSDGRGGITRPEADGYRLALSRAYERAGFGIDTVALFEGHGTGTEVGDTTELTALSLARRAAAPQAAPAAVGSVKGMIGHTKAAAGVAGLIKAVMAVRDQVLPPTTGCVDPHPLLADDDAALRVLRKAEPWPADAPVRAGVTAMGFGGINTHIVLEGADERRRVPFDTRTRALAASVQDAELLLVDADSADALRARVAELAEFVPKLAYAQLSDLAAVLQRDLGDRPYRAAVVASSPEHAEARLRRVLAVLESGESGLHAPDGGAFLGRVSGRGRIGFLFPGQGSGTGTAGGALRRRFAEVEDVYLRAKLPERGDMIATHVAQPRIVTGAMAGLRALSLLGLEAEAAVGHSLGELSALHWAGAMDEDALLRVAGVRGRTMAEHSASGTMASARCSAAEAAALVGDRPVVIAGHNGPAQTVLAGSVEDIEAVGRDAAANGVSWVRLPVSHAFHSPLVAPAADAFARELDGERFGPVGRRVVSTVTGDGLAAGADVRALLRRQITDPVLFGRAVEVAAKDVDLFVKVGPGRVLTGLATDITEVPAVAMDTDDESLGGFLTVLAAAYVRGAPVRHEVLFHGRLARPLEIGAEFSFFASPCETPPPVRITGTARRSGRAVPVPDAPADGAAAGGAEADAAEPSIDLLRRLLAERVELPPEMVADDSRPLDDLHLSSITVGQVVNQAVRLRGLAVTQAPTNFATATLRELAETLDTLAETALPGDLEPGSAVAGAAAWARAFSLDLDTEPLPRPATSTAPSLAAGGAGGWTVHATEGHPLAGPLRDALERAGAGPGVLVCLPPDCTDDQLEPALDGVRDALAGAPGTRFVLVQDGRGAAGLARTLRLEAPHLRVTIVHTPPSADAVDRVVAEVAATGEFAEAYYGADGERRVPTLRAMPVRAARGDPPLDSSDVLLVTGGGKGITAECALAVAADTGARLAVLGRSDPAEDAELAANLARMSDAGATVRYARADVADPVRVAAAVAELTESLGPVTGVLHGAGRNVPAGLAGLDMPEIHRTLAPKTGGLEAVLAAVDPARLKLLVTFGSIIGRAGLRGEGHYATANDRLAQLTREFAGRHPDCRTLCMEWSVWSGVGMGERLSVVEGLGREGITAITPDQGVEIMRRLVADPDAPSVVVISGRTGTIDTVRHDAPELPLLRFTGRPLVRYHGVELVAETELNVGSDPYLADHLLDGNLLFPAVLGMEAMAQAASAATGREEPPAFEGAEFLRPIVVPPEGSTTIRVAATVVDDGAVQVAIRTADTDFAADHFTARLVYPDGPLPDGPPDQVGDGLPEVPLDPAADLYGGVLFQGARFQRLRRYHRAAARHVDADVAAVPAGGWFAGFLPGGMLLADPGMRDALMHGNQVCVPDATLLPSGVERLRPAGPGVVGDLRYCATERERDGDTYVYDIAVRDATGAVVERWDGLRLQAVRKGDGRGPWVPPLLGSYLERELEDLLGVHVAVAVEPDPPAEANGGRGDRTAAAAARASGGAVSVRRRPDGRPELGDGRPVSASHGSGVTLCVVADEPGAGPLGCDVETVAERAPADWAGLLGDAAALAKVIAAERDERYATAATRVWAAIESVRKAGLPADAPLTLAPAGAGPWVVVASGGLRIATLVTALRDEPDPVVLAVLVEGRS

SEQ ID NO: 29 - DNA, 459 bp, Actinomadura sp. 21G792
  CDS (1)..(459)
atggacaaccattacgaataccggcacacggtcggtttcgaggagaccaacatcgtcggcaacgtctactacgtcaactatctgagctggcaggggcgctgccgggagatgttcctcaaggaacgcgcccccgacgtgctcgccgagatccaggacgacctgaagctgttcacgctgaaggtgagctgcgagttcttcgccgagatcacggcgttcgacgagctgtccatccggatgcacctgctggaactggcgcagacgcagctggagttcggcttcgagtacgtgcggctcgacccgggcgggctggagaccctgatcgcccggggccgccagcgggtggcctgcatgcgcggccccaacacccggacggcaccggcgcgggtccccgacgcgctggtcagcgcgctgcgtccgtacaccagggaggcgccgagcccggcggggagggcgtcatga

SEQ ID NO: 30 - protein, 152 aa, Actinomadura sp. 21G792
MDNHYEYRHTVGFEETNIVGNVYYVNYLSWQGRCREMFLKERAPDVLAEIQDDLKLFTLKVSCEFFAEITAFDELSIRMHLLELAQTQLEFGFEYVRLDPGGLETLIARGRQRVACMRGPNTRTAPARVPDALVSALRPYTREAPSPAGRAS

SEQ ID NO: 31 - DNA, 552 bp, Actinomadura sp. 21G792
  CDS (1)..(552)
atgagcgtcgatcccggtcagtccccgggcgagggcggcgcggacatgacggccaccgacctgcgccgggccttcgggacgttcgccacgggcgtcaccgtggtcaccgtcggcggccgcgagccgcacggcatgaccgcgaactccttcacctcggtctcgctcgacccgccgctggtgctggtctgcgtcgggcgcagcgcggtcatgcaccagcggctggccgtcggctccttcggcatctcggtgctgggggccgggcaggagtcggtggcgcggtacttcgcggacctgtcccgcccgctgggcgcggcccagttcgaccggatcggctgcacgccgggccgggccaccggggcgccgctgatcgacggcgcgctcgcgcactacgaatgcgagctgtggagcaccgccgaggcgggggaccacacgatcttcgtcgggcggctgctgacggtgcaccgcgccgagccggggcccggcgaggggctgctgttctaccagggccgcttccggcggctggagcccggacggagcgaggtgaaggcgtga

SEQ ID NO: 32 - protein, 183 aa, Actinomadura sp. 21G792
MSVDPGQSPGEGGADMTATDLRRAFGTFATGVTVVTVGGREPHGMTANSFTSVSLDPPLVLVCVGRSAVMHQRLAVGSFGISVLGAGQESVARYFADLSRPLGAAQFDRIGCTPGRATGAPLIDGALAHYECELWSTAEAGDHTIFVGRLLTVHRAEPGPGEGLLFYQGRFRRLEPGRSEVKA

SEQ ID NO: 33 - DNA, 1395 bp, Actinomadura sp. 21G792
  CDS (1)..(1395)
gtgagcatcgacgagctggacgcccgcggcgggacgccgcgggccgccggccgggtcccgcccggaccgccccgccgcgcgacgccgaacctgctgcggatgctggcgaccgaccggctcggcatgatgcaggcggccctccggcacggcgacgccgtccgggtcgggctcgggcccaaggccctgtacctgttcaaccgtcccgagcacgccaagcacgtcctggcggacaacagcgggaactaccacaagggcatcggcctggtgcaggcccggcgcgccctcggtgacgggctcctgaccagcgagggcgacctgtggcgcgagcagcgcagggtcgtccagcccgcgttccagcacaagcggatcgccgggctggccgacgcggtcgtcgaggaggcgggcgcgctggtcgcccggctccgggcccgcgcgggcggccccccggtcgacgtggtgggggagatgaccgcgctgaccctcggggtgctcggacgcaccctgctggacgccgacctgaccgcgcacacctccctgggacgggcgttcgagaccgtccaggaccaggcgatgttcgagatggtgagccagggcatggtcccgatgtggctcccgctgcccggccagctccgcttccgccgggcccgccgggagctggaccgcatcgtccgcgccctggtggccgagcgcctccgcgagggcggcggcgccgaggacgcgctgtcccggctgatcgagtcggcgcggcgggaaccggacggccgggtcgggcggcggcggctgcgcgacgagctcgtcacgctgctgctggccgggcacgagacgaccgcgagcacgctcggctggacgttccacctgctcgaccggcacccgctggtgcgggcccgggtgcgcgcggaggcacgggcggtcttcggcgacgggacgcccaccctggacgacctctccgcgctgtcgtacaccacgatggtcgtgcaggaggtcatgcggatgtacccgcccgtgtggatcctcacgcgggtggcgcagcgggacgacgaggtcggcgggtaccgcgtcccggcgggcgccgacgtgctcgtctgcccctacacgttgcaccgtaacccggatttctgggaatggcccgatgtgttcgaccccgatcgcttcggtcccgggcgctccgagggccggccgcgctacgcctacatcccgttcggggccggtccgcgcttctgcgtcggcaaccacctcggcatgatggaggccgtcttcgtgacggccatggtggcgcgcgacctgcggctgaccggggtgcccggccgcgacgccgtgcccgagccgatgctgtccctgcgggtgcgcgggggcctgccgatgacggtgcacgacgacgccggcgccggcgcctag

SEQ ID NO: 34 - protein, 464 aa, Actinomadura sp. 21G792
VSIDELDARGGTPRAAGRVPPGPPRRATPNLLRMLATDRLGMMQAALRHGDAVRVGLGPKALYLFNRPEHAKHVLADNSGNYHKGIGLVQARRALGDGLLTSEGDLWREQRRVVQPAFQHKRIAGLADAVVEEAGALVARLRARAGGPPVDVVGEMTALTLGVLGRTLLDADLTAHTSLGRAFETVQDQAMFEMVSQGMVPMWLPLPGQLRFRRARRELDRIVRALVAERLREGGGAEDALSRLIESARREPDGRVGRRRLRDELVTLLLAGHETTASTLGWTFHLLDRHPLVRARVRAEARAVFGDGTPTLDDLSALSYTTMVVQEVMRMYPPVWILTRVAQRDDEVGGYRVPAGADVLVCPYTLHRNPDFWEWPDVFDPDRFGPGRSEGRPRYAYIPFGAGPRFCVGNHLGMMEAVFVTAMVARDLRLTGVPGRDAVPEPMLSLRVRGGLPMTVHDDAGAGA

SEQ ID NO: 35 - DNA, 756 bp, Actinomadura sp. 21G792
  CDS (1)..(756)
atggacgcgcgcacgacggacagcattaagcgggtcatcgaaaccattcatcacaatatcggggagaagatcacgatcgacgacatggcccgcaccgcgatgttcagtaaattccactttacccgactcttccagcgagcgaccggcgtctcaccaggaagattcctctccgcagtccgcctgcaggaggcgaaacggctgctgctcaccacggaactcagcgtcaccgagatcagccaccgcgtcggatacaccagcgtcggcaccttcagttcccgtttcaagagcagcgtgggcctttcgcccagcgcctatcgcgagttgacgggctacgcgccgcacatcaccgacgcgcccccggcaaaagggcgcaacgccagcgtggtgcacggggagatagtgccgccgccgtcggacgacgaaaccggcccggtctttctggggctgtttcccgacaccatcccgcaggggaatccggtccgctgcacggtgctcccccggccgggccgcttcaagctggagaacgttcccgacggctgctggtacctgctcgcccagtccgtccggccgggctacgaggaggtcctcggcgacctgcccccgatcgtcggagcgcacgggcccatcacgatgcacggggaaccggtcgtccggctggtggaggtgcggctgcggccgatgcagacgctggatccccccgtgctgctcgccctgctcgacgcgcggcgcacggcgctgcacgccgcggcgggctga

SEQ ID NO: 36 - protein, 251 aa, Actinomadura sp. 21G792
MDARTTDSIKRVIETIHHNIGEKITIDDMARTAMFSKFHFTRLFQRATGVSPGRFLSAVRLQEAKRLLLTTELSVTEISHRVGYTSVGTFSSRFKSSVGLSPSAYRELTGYAPHITDAPPAKGRNASVVHGEIVPPPSDDETGPVFLGLFPDTIPQGNPVRCTVLPRPGRFKLENVPDGCWYLLAQSVRPGYEEVLGDLPPIVGAHGPITMHGEPVVRLVEVRLRPMQTLDPPVLLALLDARRTALHAAAG

SEQ ID NO: 37 - DNA, 1011 bp, Actinomadura sp. 21G792
  CDS (1)..(1011)
atgagtgacacggaacccccccgagaggcacccccgacggacaccggcgagacgggaaccgaatcaaattcgcctgctctgccgcccgttaataccgtactcgtcgacgaactcctgcccggaatctcgccacggcgcgccgaggacccggaacacatacatcggctcgcccaaaccgactcgaagcttccacccatcctggtccattacccgagtatgcgcgtcatcgacggcatgcatcgcctgaaggccgcccttttacagggtaagcgcgagatcgacgtgatttttttcgacggcagcgacgacagcgccttcctccgggccgtgcaggagaacatcgcgcacgggctgccgttgtcgctcgccgagcgcaaggccgcggcgctgcgcatcatcgacacctggaacgacctttcggaccgcgcgatcgccgccaacaccgggctgtccacgcggaccgtcgcccagttgcggaagcgctcgaccgacgaatcgccgcacttgaacaaacgccgggggctggacggccgcatgcggccactggaccatcacgagggtcggcggcgggcggcggaggcgatgacccggtggcccgacgcctcgctccgggagatcgccaggatcgccgacgtctcgctgggcacggcgcacgacgtccgccggcggctgcaccgcggggaggacccggtgccgtccggcgcccggcccgcgacaccccccgtcaggaccgtccgcaacgatggcgacctgcgcactcctcccgccgaggaccccatcctcatgctccagaagctcgcccgggacccggcgctgcggcagaccgagcccggacgccagctgctgcggctcctgcactcgcgcatggcgaccccccgggactggagcgccctcatcgtctcggtccccccgcactgcgcggagacggccgccgccgtcgcccggcactgcgcccgcaactgggagcagatggcgcaattgctggagcgccgcgcagagtcaccgccctga

SEQ ID NO: 38 - protein, 336 aa, Actinomadura sp. 21G792
MSDTEPPREAPPTDTGETGTESNSPALPPVNTVLVDELLPGISPRRAEDPEHIHRLAQTDSKLPPILVHYPSMRVIDGMHRLKAALLQGKREIDVIFFDGSDDSAFLRAVQENIAHGLPLSLAERKAAALRIIDTWNDLSDRAIAANTGLSTRTVAQLRKRSTDESPHLNKRRGLDGRMRPLDHHEGRRRAAEAMTRWPDASLREIARIADVSLGTAHDVRRRLHRGEDPVPSGARPATPPVRTVRNDGDLRTPPAEDPILMLQKLARDPALRQTEPGRQLLRLLHSRMATPRDWSALIVSVPPHCAETAAAVARHCARNWEQMAQLLERRAESPP

SEQ ID NO: 39 - DNA, 657 bp, Actinomadura sp. 21G792
  CDS (1)..(657)
atgggtcatgcgggagcgggcgcaccaatggtctttagcgataaggcgctcgacgggcttccgcgtgaaccgatggaggtgacgccggtgggtacggctgctgtggaggacgagcgcgccaggagaatgaccctcgaggccttcgccgacaccatgatccccggagagcggcggttccccggggacaggacggtggcgggcgccgcaccgggccccggcgcggtcgccgcgggcgcggtggaactgctggagacgccggcggccggcatcgtccacgacctgcccgagctggtcgcgatgctggacgagcacgcgcgcggccacgccgggcggcagggcctggccctggacccggacgtgcccgcgttcgtcgccctgccgttcgccgaacggaccgcgctggcgcaggcgctgctggcccccggccatccggagaacgaggcgtggatcctggtcgcgctgttctgcgtcatggccttcgacaccggcgcgcacctgcacacgctggacgcgatcgcccaggggcatcccggcctggcccacatggggctggagagtcccgactccgacgggttgtggcgtttccccacctattcctacggccgccgcctggccgacatacacccggacacgacctcctcggggagcccgcgatga

SEQ ID NO: 40 - protein, 218 aa, Actinomadura sp. 21G792
MGHAGAGAPMVFSDKALDGLPREPMEVTPVGTAAVEDERARRMTLEAFADTMIPGERRFPGDRTVAGAAPGPGAVAAGAVELLETPAAGIVHDLPELVAMLDEHARGHAGRQGLALDPDVPAFVALPFAERTALAQALLAPGHPENEAWILVALFCVMAFDTGAHLHTLDAIAQGHPGLAHMGLESPDSDGLWRFPTYSYGRRLADIHPDTTSSGSPR

SEQ ID NO: 41 - DNA, 1659 bp, Actinomadura sp. 21G792
  CDS (1)..(1659)
atgaccgcaacggagagcaccgacgtcctgatcatcggcagcgggttcggcggcgcgatcgccgcctaccacctggccgccggcggtgccgacgtcgtcgtgctggaacgcggcccgtggctggagggcgacgacttcgagcacgacttcaagctcggctcgtcctacacccggatcttcgacttcgtcgtcggcgacggcatgagcgtgctcggcggcaactgcgtcgggggcggcagcgtcgtgtacttcgcggcgatgccgcgcgcgccgcggttcatcttcgagcggcgcggcggcatcggccgccggatgtggccggagagcgtctccagggacgcgctggaaccgtggtacgaccgggtggaggaggcgctgccggtcgtcaagcagtcctgggacgaggtcacctacgcgggcgggctctgggcggcggcgtgcgaccacgcgggccgcaccgcgaaccccgtgccggtcgccgtggacaactccaagtgcgtcaactgcaactggatgatggccgggtgcaagttcgacgccaagcggtcgctgctgttcaactacctgcccgcggccgtggcggagggcgccgagatccggccgctgcacgaggtccagcggctcacccgcaacgccgacggcggctaccgcgtccactacaacgtcatcgacggcgaggactaccgggtgcacaccgggaacgggaccatcgacgccaagatcgtggtcctggccgccggcagcgcggcgacgccggtgatcctccagcgctccgaggacgacctcgggcggatgccgcacgcggtgggccgctacttctccggcaacggcgagcggctgaacaccgcggtcgtcaacgaggacaaggtgcgggaggtgctcggcctgtcgcgccccgacggccgcgcctacgccgccaaccagatcggccgcgggccggtcgtggcgagctgggaccggctcgacggaagcctgcccgagtactcgcgcttctcgctggagcagctctacttcccgcccggcctgggcaccatcctcgcccaggtcccggacgccgccgggcccacctggttcggcgcggagaagaaggagatgctgcggaactggcagtcgtggctgaccatcttcaccatctccgaggacgacaacgagggggtcttcgggccgccgccggcgaccggcaacgccatgcgcatctcgcagcagatgctcggccgcggcaacctgcactaccggccgacgctgaacaccatgcgcgggtgggccgagtccgacgccgccgtccgggacatcctcgaacgcgacgggctggccgaggtgcggccgtggacgaacgacctggtcggcgcgtacaccgtgcatccgctcgcgtcctgccggatcggcgacgaccccgcgacctcggcgctggacgaccggcacgagctgcgggggcaccccgggatcttcgtcaccgacggctcggcggtgccctgcggcctgaccgtcaacccggcgatgaccatcgccgcgctggcggagcgggccatgcccgcgatcgtgcgcgcggcgcgggaccggggcgtcgaggtcgggtacggggcgcccgcgcccgacggctcgacggccggccgccgggccacgctgccgctggcgcccgcggtgggcggggaccgatga

SEQ ID NO: 42 - protein, 552 aa, Actinomadura sp. 21G792
MTATESTDVLIIGSGFGGAIAAYHLAAGGADVVVLERGPWLEGDDFEHDFKLGSSYTRIFDFVVGDGMSVLGGNCVGGGSVVYFAAMPRAPRFIFERRGGIGRRMWPESVSRDALEPWYDRVEEALPVVKQSWDEVTYAGGLWAAACDHAGRTANPVPVAVDNSKCVNCNWMMAGCKFDAKRSLLFNYLPAAVAEGAEIRPLHEVQRLTRNADGGYRVHYNVIDGEDYRVHTGNGTIDAKIVVLAAGSAATPVILQRSEDDLGRMPHAVGRYFSGNGERLNTAVVNEDKVREVLGLSRPDGRAYAANQIGRGPVVASWDRLDGSLPEYSRFSLEQLYFPPGLGTILAQVPDAAGPTWFGAEKKEMLRNWQSWLTIFTISEDDNEGVFGPPPATGNAMRISQQMLGRGNLHYRPTLNTMRGWAESDAAVRDILERDGLAEVRPWTNDLVGAYTVHPLASCRIGDDPATSALDDRHELRGHPGIFVTDGSAVPCGLTVNPAMTIAALAERAMPAIVRAARDRGVEVGYGAPAPDGSTAGRRATLPLAPAVGGDR

SEQ ID NO: 43 - DNA, 1098 bp, Actinomadura sp. 21G792
  CDS (1)..(1098)
atgaccggtatcccggcccgggcggcgcggacacgcgcgcaggggcagatccgatacgtcacccccgtgccgtacgcggcggcacgggggacggtggctcgggtctacgcgcaggtcgaacgcgacttcggcctgctggcgccgcccgtggccctgcacgccgcggtcccggaggtgctcgcggcggcctggacgatgctgcgggagaccctcgtcgcctcgggggcggccgaccggacgaccaaggaggccgtcgccaccgccgtctccctcgccaacacctgcccgtactgcgtcgaggtgcacggggtgaccatgcggggcctggcggcggacgacgccgccggcctgatcgccgcggaccggatcggggagatcgccgatccggggctgcgggcggtcgccgagtgggcgcgccggaccgggacgccggaggccggtgcgccgccgtccgggtccccggcgggggagctcgtcggcgtggccgtcaccttccagtacctcaaccgcatggtgaacgtgttcctcccggactcgccgctgcccgcgaacctgccggaccccgcgcgcggggccgcccggcggctggcggcccggatcatgcggtcgggggcccgcacgcaccgggcccccggcgggtccgccggcctcctgccgcccgcaccgccgccggacgacctggcgtgggcggccggtgcgccggacgtcgcggacgccttcgcgcgggccgccgccgcggtcgaggaggcgggccgccggtggctgccgggccccgtgcgggacgtcgtgtcggccgccctggacgagtgggacgggcgtccgccggggccgagccgggcgtggaccggcccgctcgtccgggacctgccggagtccgcgcgtccggcggcccggctcgcgctgctgacggcgatggcctcctaccaggtggacgcgccggtcgtcgacgcctaccggcgggccgagccggtgcgggacgggtcgcgggacgggtcgcgggacgcggcgctgatcgccctgaccgcgtgggcggcgttcgcggccgcccgccggacgggcgcccggtcggcacgccgggagaagcccgccgggacctga

SEQ ID NO: 44 - protein, 365 aa, Actinomadura sp. 21G792
MTGIPARAARTRAQGQIRYVTPVPYAAARGTVARVYAQVERDFGLLAPPVALHAAVPEVLAAAWTMLRETLVASGAADRTTKEAVATAVSLANTCPYCVEVHGVTMRGLAADDAAGLIAADRIGEIADPGLRAVAEWARRTGTPEAGAPPSGSPAGELVGVAVTFQYLNRMVNVFLPDSPLPANLPDPARGAARRLAARIMRSGARTHRAPGGSAGLLPPAPPPDDLAWAAGAPDVADAFARAAAAVEEAGRRWLPGPVRDVVSAALDEWDGRPPGPSRAWTGPLVRDLPESARPAARLALLTAMASYQVDAPVVDAYRRAEPVRDGSRDGSRDAALIALTAWAAFAAARRTGARSARREKPAGT

SEQ ID NO: 45 - DNA, 786 bp, Actinomadura sp. 21G792
  CDS (1)..(786)
gtgttcgacgacctggccgccgaggccgacgtcatcgatcggctggtcgcggaaattcacgaatcggactggcgggccgagtcgcccgctcccggatggacggtgttcgaccagctcgcccatctcacgttcatcttccggctcgccggaacggccgccgccgacgcggcgaagttccagaagatgatcgagggggcggaggccgacttcaacggcgcggtgaacgccgcgctggccgaattcaagggcgactcgccggcggaactgctgcggaaatggcgggaggcgcgggacttcgcggtgcccgcgctggcggcggtgcccggcgaccaggtggtgccgtggctggtccggccgctgcccgcggcgatcctcgcctgcgcggggatcatggagtgcttcgggcacggccaggacatcgccgacacgctgggcgtccgccgcgagcccaccgaccggctcgtccacctggtgggcttcgcgatcctcgtccaggagttcggctaccagtcccggggcctgacccagccggacgtcgagttccgcttcgagatcacggccccgtcgggcgagctgtgggcgttcggcccggaggactcgccggagcggatcaccgggtccgcgctcgacttctgcatgctggtgacgcggcgccggcaccgcgcggacctcgacgtggtcgcgaccggcgcggaggccgagcgctggctcgacatcgcgcaggcgtaccggggcccggcgggcgaggggcgccggccggggcagttcgccgcggcgcggggctga

SEQ ID NO: 46 - protein, 261 aa, Actinomadura sp. 21G792
VFDDLAAEADVIDRLVAEIHESDWRAESPAPGWTVFDQLAHLTFIFRLAGTAAADAAKFQKMIEGAEADFNGAVNAALAEFKGDSPAELLRKWREARDFAVPALAAVPGDQVVPWLVRPLPAAILACAGIMECFGHGQDIADTLGVRREPTDRLVHLVGFAILVQEFGYQSRGLTQPDVEFRFEITAPSGELWAFGPEDSPERITGSALDFCMLVTRRRHRADLDVVATGAEAERWLDIAQAYRGPAGEGRRPGQFAAARG

SEQ ID NO: 47 - DNA, 690 bp, Actinomadura sp. 21G792
  CDS (1)..(690)
atgaccggaccggcggttcccgacgtcaagcacgtgcccgtcgaccgggcgacccgcgagtacctcctgcgctcgtgctcgccggccgacccggtggtgcgcgacctggccgcgcgcacggccgaggtcggcgacgccgcgggcatgatggtgccggtcgagcaggccgccctgctcaccctgctgaccaggctggtgtccgccgccgtggtcgtggacgtggggaccttcaccggactgtcggccctggccttcgcccgcggcctggcgcccggcggcaccgtcgtcacctgcgacgtgaccgacgagtggctggacgtcgcgcgcgagcactggcggcgcgccggggtcgccgaccgcatcgagttccggctcggcgcggcggcgcggacgctgaccgacctcgccgccggcccggcggccgacctggtcttcctcgacgccgacaagatgaactacccccgctacctcgggctggcggtgccgctgctgcggccgggcgggctgctggtggccgacaacgtcctgctggacggctcggtcctcgaccccgcgcgggcacccgccgggctgccgcgccgcgcggcggagcggatgcgcgagttcaacgccgcgctcgccgcggacgaccggctggaggccgtcatgctgcccatcgcggacgggatgacggtcgcccggaaacggtga

SEQ ID NO: 48 - protein, 229 aa, Actinomadura sp. 21G792
MTGPAVPDVKHVPVDRATREYLLRSCSPADPVVRDLAARTAEVGDAAGMMVPVEQAALLTLLTRLVSAAVVVDVGTFTGLSALAFARGLAPGGTVVTCDVTDEWLDVAREHWRRAGVADRIEFRLGAAARTLTDLAAGPAADLVFLDADKMNYPRYLGLAVPLLRPGGLLVADNVLLDGSVLDPARAPAGLPRRAAERMREFNAALAADDRLEAVMLPIADGMTVARKR

SEQ ID NO: 49 - DNA, 288 bp, Actinomadura sp. 21G792
  CDS (1)..(288)
atgcccgaaagagactcacacgattcgtcgacggcgctgatcgaaaagcgcgtggcggaaatctggcaggacgttctcggcatgccggacggcacctgcgatggcactttcttccagttgcgcgggcaatcgatctcggcggtccgcatcaccggccgcatcgaggacgacctgggcatcgtggtggacgtgggcgtgctgttcgaggaccccgatctggccgcgttcacccgggaggtcctcgcggcccgcggtgccgagggcgtcgcggccggcgcgggcgactga

SEQ ID NO: 50 - protein, 95 aa, Actinomadura sp. 21G792
MPERDSHDSSTALIEKRVAEIWQDVLGMPDGTCDGTFFQLRGQSISAVRITGRIEDDLGIVVDVGVLFEDPDLAAFTREVLAARGAEGVAAGAGD

SEQ ID NO: 51 - DNA, 3363 bp, Actinomadura sp. 21G792
  CDS (1)..(3363)
atgactgcgatcggaacggccccgcacgatgccggggccgcctccggcgtccaggccggtttccggttcctggaccgcatggccccggacgggacggcgcaccggatccgccgcgcgtacgaggtgcgcgggccgctcgacgtgcccgccctccgcgacgcgtggacggcgacgctggaccggcacgaactgctgcgcaccgccatcggggaggacgacgacggacggccggtgccgctgccggtcgccgacccggccgcctcgttcgtccgggacgggcgtccccggcacgccggcggggcgcccgccacgctgacggtgacgagccgggcgccggactcccaccgtctcctgctggacctgcacccggcctgcgccgacgaacggtcggtcgcgatcgtcctggcggagctgtcgtaccgctacgcccgcgcggtcggagccgagccgggcgacgcgccgccggaaccccgcgcccggtacctcgaccacgccgcccggagccgcgcggccgaggccgcgcccgcgttccggcgctcgctggcctggtgggcggcggcgctgacaccgccgcccgaacccccggacctgcccgccgacggggcccgctcgggcgtcgccgcggaccgcgcgtccgtgccgttcacctggacggacggcgtcgcggagccgctcgcgcggctgtgcgaacgcgagcgggtgcggccggacgccgtgctgctcgcggccctgcacgccctgctccaccggtacggcggcgcggcgcggacggcggtcggcgtcccgtgcccggtgcgcccggccggatccgccggcgtcgtcggccccttcgagaacctgctggtccacgtcgcggactccaccggtgacccgtccttccgcgagctggtccggcggacggcgcgcaccctgcgggcggcccgcgagcaccgcgcggtgccgttcgaccggatcgtccggaccgtggacgttccgcgcgccccggaccgcctccccctgtgcgacgtcctgttccggtacgcggaggacgagccgtccgggctccggctccccggtgccgaggtgcgcccgtccgaggccgccgccccggccgtcgccgcactctccctgagcatcgagggcgcctccgcgtcccgcgtggcgggcaccctcggataccggaccgacatgttcgggcgcgaggccgcggagggcgtcctcacccagctccgcacgctactggccgccgcgctcaccgcccccgaaacccccgcggacgccctccccctgaccccaccgaccacggacacgtcggacctgaccacgcgggtggaggcggacccgccggacgcgcccccttcgacccactcggcccccccgaccctgccgggcgcggacccgtcggctgcgacggatccgtcggacgcgggctcctcggccctgccgggcgcggacctgtcggacctgtcggacacggcgtccggcgcggtgcccggcacggggacgggcgcagcgtccggtgcggggaccgtgcacgggatggtgttgcggagtgcggcgcgtgtgcccggggccgtcgccgtctcccatctcggcgaggagctgacctacgcggagctggagcgcgagtcgtcccggatcgccgcgtacctgcgcggcatcggggcggagggcgcgcccgtggcgatccgggcgcccgccgggacgcgccggatctcggcgtcgctcggtgcgctgcgcgccggggcgcacctggtctggttcggccccggggacgtgggggagcgggggcggcaggtcctcaccgagctgcgtccggcatgcctcctgctggacggcgacccggagcaggacccgctcggccgctggtaccgcgacgagctgggcggccggacggtcggcgtgtccgccgcgggccgcgaaccggacccgctccccccggacggccccgcggggcccggcaccacggtgtacgtcgcccacacctcgggttcgacgggacgcccgaagggcgtcgcccacacgcacgcgtcgttcgcccagttcctcacctggatggcggacgcgctcgacatcgggcccggcacgcggctggcgcagtgggcggcccccgagcacgacccgagcctgtgcgaggtgttcgcgacgctcgccgcgggcgggacgctgtgcccggtgccggaccggatccgggctcaccccgaacgcctcgtcgactggctggtcgcggagcggatcacgttcctccaggtcatccccggtctcgcccgggagctgctgaaggagctgcggcggcgcggcgggacggagcggctcgcggcgctggaccgcctggtgctcatgggcgaggcgctgcccggcgagctggccgacgcgctgcgcgacgcgctgcccggcgcccggctcgccaacgtctacggccccaccgagacgatcgcggcgacctggtacgacatcacgggaccggtcgcgggcacggtgccgatcgggcggccgatccccggccgtcaggtcctggtactggacggcgcggaccggccgtgccccaccggagtgaccggcgaactcgtcatccgcagcccgtacgccgccgccggatacgtcggcgggatcggtgacgaggcgttccgtccggtgcccggcctggacgacccgcccggtgcgggcggtcccgtgcgctgctaccgcaccggcgacctcgcgcgccgccgctgggacggcctgctggagttccgggggcggcgcgaccaccaggtcaagctgtccggcgtccggctggagctcgccgagatcgaggccgtgctcgccgcacaggactcggtcgccgagtgcgcggtcgtcccggtcgtcgacggggacggcctggtgagccggctcgtcgcctacgtcgtgcccggcccggacggggacgcgggcggggcgaccgaatggcgggcccggctgcgcggccgcttcggcgcgtcggtgcggctggtgtccttcgagaccctccggggcccgctgccgcgcaacgccgcgggcaagatcgaccggcgccggctgcccgtgcccggaccggtcgccgtcccggcacgggcgcccaagggagccgtcgagggagccctggccgacatctggcggcggctgctggacgtcgagcacgtcgacgccggcacgtcgttcttcgcggcgggtggccactcgctgctgctagcccggctcgccagccggatccgaaggcgcttcggggtggagatcccgctcctcgagtgcctcgcacaccccacgttggccggaatgtccgcgctgatcgaggcatcgggcggagcggacgccgggacgtggacacaccagcgggcagacgtcgacgccgagaccggcactgtccccgagcgatcggagtga

SEQ ID NO: 52 - protein, 1120 aa, Actinomadura sp. 21G792
MTAIGTAPHDAGAASGVQAGFRFLDRMAPDGTAHRIRRAYEVRGPLDVPALRDAWTATLDRHELLRTAIGEDDDGRPVPLPVADPAASFVRDGRPRHAGGAPATLTVTSRAPDSHRLLLDLHPACADERSVAIVLAELSYRYARAVGAEPGDAPPEPRARYLDHAARSRAAEAAPAFRRSLAWWAAALTPPPEPPDLPADGARSGVAADRASVPFTWTDGVAEPLARLCERERVRPDAVLLAALHALLHRYGGAARTAVGVPCPVRPAGSAGVVGPFENLLVHVADSTGDPSFRELVRRTARTLRAAREHRAVPFDRIVRTVDVPRAPDRLPLCDVLFRYAEDEPSGLRLPGAEVRPSEAAAPAVAALSLSIEGASASRVAGTLGYRTDMFGREAAEGVLTQLRTLLAAALTAPETPADALPLTPPTTDTSDLTTRVEADPPDAPPSTHSAPPTLPGADPSAATDPSDAGSSALPGADLSDLSDTASGAVPGTGTGAASGAGTVHGMVLRSAARVPGAVAVSHLGEELTYAELERESSRIAAYLRGIGAEGAPVAIRAPAGTRRISASLGALRAGAHLVWFGPGDVGERGRQVLTELRPACLLLDGDPEQDPLGRWYRDELGGRTVGVSAAGREPDPLPPDGPAGPGTTVYVAHTSGSTGRPKGVAHTHASFAQFLTWMADALDIGPGTRLAQWAAPEHDPSLCEVFATLAAGGTLCPVPDRIRAHPERLVDWLVAERITFLQVIPGLARELLKELRRRGGTERLAALDRLVLMGEALPGELADALRDALPGARLANVYGPTETIAATWYDITGPVAGTVPIGRPIPGRQVLVLDGADRPCPTGVTGELVIRSPYAAAGYVGGIGDEAFRPVPGLDDPPGAGGPVRCYRTGDLARRRWDGLLEFRGRRDHQVKLSGVRLELAEIEAVLAAQDSVAECAVVPVVDGDGLVSRLVAYVVPGPDGDAGGATEWRARLRGRFGASVRLVSFETLRGPLPRNAAGKIDRRRLPVPGPVAVPARAPKGAVEGALADIWRRLLDVEHVDAGTSFFAAGGHSLLLARLASRIRRRFGVEIPLLECLAHPTLAGMSALIEASGGADAGTWTHQRADVDAETGTVPERSE

SEQ ID NO: 53 - DNA, 1614 bp, Actinomadura sp. 21G792
  CDS (1)..(1614)
gtgaaggtgactcagaccgagattcgaatgccggttgacatcaacggcgaggacatggacatcgacgggctccggcaggtggccgagcagcggatcccgtgccggctgacgccgacggtgctggacaaggccgccaagagccgagcgcagttcgagaccctcgtcacgcaggacgtccccgtctacggggtcaccaccggctacggcgagatgatctacatgctggtggaccgggccaacgaggtggaactgcagaccaacctggtgcgcagccacagcgccggggtcggccggccgttcgccgaggacgagtcgcgcgcgatcgtcgccgcccggctcaacgcgctggccaagggccactcggccgtccggcccgagatcctggagcggctcgcgctctacctcaacctgggcatcaccccggccatccccgagatcggctcgctgggcgccagcggcgacctggcgcccctgtcgcacctggcgtgcacgctcatcggcgagggccggatcctgcgggacggcgcggcggtggagaccgggccggagctgcgccggctgggcatcgagccgctggagctgcgcttcaaggagggcctcgcgctgatcaacggcacgtccgcgatgaccgggctgggggcgctggtcgtcggccgcgcgttcgagcagatccggcaggccgagatctgcaccgcgctggtcatcgaggcactgcgcgggtcgatgggcccgttccagccggaggggcacgacatcgcccgtccgcaccccgggcagatcgactcggcggccaacatgcgcgccctgctgcgcggcagcggcctgaccgtcgagcacgccgacctgcgccgcaccgtccaggagcgcaagcgggaggaggagagcgtccagcgcaccgacatctacatgcagaaggcgtactcgctgcgggcgatcccgcaggtgctcggcgccgtccgcgacacgctcggcagggccggcgagacggtcgaggtcgagctgaactccgccaccgacaacccgctgttcttcgagggccgggagatcttccacggcgccaacttccacggccagccggtcgcgttctccatggacttcacgacgatcgcgctgacccagctcggcgtcctgtcggagcggcgcctcaaccgcctgctcaaccggcacctcaactacggcctgccggagttcctggtcatgggcgagcccggcctcaacagcggcttcgcgggcgcgcagtacccggcgaccgcgctggtcgccgagaaccggacgatcggcccggccagcacgcagtccatcccgtccaacggcgacaaccaggacatcgtgagcatggggctgatcggcgcccgcaacgcgcgccgcgtcctgaacaacaaccacacgatcctggccctggagttcctcgccgccgcccaggcggtggacgtcgccggacgccgcgacgggctcggccccgcgggcgccgcgacgtacgagctcgtccggtcgatggcgccgaccctggaacgcgaccggtacatggccgacgagatcgaggccgtggccgacgcggtctcgcgcggggccttcctggaggcggcccgctccgcgggcgtcgagctgcgctga

SEQ ID NO: 54 - protein, 537 aa, Actinomadura sp. 21G792
VKVTQTEIRMPVDINGEDMDIDGLRQVAEQRIPCRLTPTVLDKAAKSRAQFETLVTQDVPVYGVTTGYGEMIYMLVDRANEVELQTNLVRSHSAGVGRPFAEDESRAIVAARLNALAKGHSAVRPEILERLALYLNLGITPAIPEIGSLGASGDLAPLSHLACTLIGEGRILRDGAAVETGPELRRLGIEPLELRFKEGLALINGTSAMTGLGALVVGRAFEQIRQAEICTALVIEALRGSMGPFQPEGHDIARPHPGQIDSAANMRALLRGSGLTVEHADLRRTVQERKREEESVQRTDIYMQKAYSLRAIPQVLGAVRDTLGRAGETVEVELNSATDNPLFFEGREIFHGANFHGQPVAFSMDFTTIALTQLGVLSERRLNRLLNRHLNYGLPEFLVMGEPGLNSGFAGAQYPATALVAENRTIGPASTQSIPSNGDNQDIVSMGLIGARNARRVLNNNHTILALEFLAAAQAVDVAGRRDGLGPAGAATYELVRSMAPTLERDRYMADEIEAVADAVSRGAFLEAARSAGVELR

SEQ ID NO: 55 - DNA, 1647 bp, Actinomadura sp. 21G792
  CDS (1)..(1647)
gtgaacgaccggaccgacgacaccgaccgaggcgaacgaagcgaccggaccgacgagaacgaccggaccgacggaaggggctggaccgacgtgagcgagcggaccgagacgtacgaccggaccgaggagtacgacgtcgtggtggtcggcggcggcccctgcggctccaccgtgtcgacgctcgtcgcacggcagggccaccgggtgctggtgctggagaaggagagcttcccccgctaccagatcggcgagtcgctgctgccggcgaccgtccacggcatctgcaagctgctcggcgtgaccgaggagctcgagcgggcggcgttcaccgtcaagcgcggcgggacgttccgctggggcgccaacccggagccgtggacgttcgcgttcgccgtctcgtcccatttcgccggagacgccgcgaccgcctaccaggtggagcgcatgaccttcgacaagatcctgctcgacaacgcccgccgcaacggcgtggaggtgcgggagcgggtgtcggtcgtggacgtcgtcgaggaggacgaccgcgtggcgggggtccgctacgtcgacacgggcgggacccggcgcgaggtgcgcgcccggttcgtcgtcgacgcgtccggcaacaagagccgcatccacgaccgggtcggcggccgccgccactactcggagttcttccgcaacctggccctgttcggctacttcgagggcggcaagcggatgcccgcccccaacgagggcaacatcctcgcggtcgcgttcgacgcgggctggttctggtacatcccgctcggccccgacctcaccagcgtcggcgcggtggtgcagccggaggcgctcgaccggatccgcggcgaccgcgaggaggcgctgcgctcgctcatcgcggactgcccgatgatcgccgactacctgtccggcgcccgccgggtcaccgaggggccgtatggggagatccggacccgcaaggactactcctacatcaaggaggcgttctggaagccgggcatggtgctggcgggcgacgccgcctgcttcatcgacccggtcttctcctcgggcgtgcacctggcgacctacagcgccctgctggcggcccggtcgatcaacaccgtgctgcgcggcgacgccaccgaggccgactgcttcgcggagttcgaggaccggtaccggcgggagtacgcgcggttccacgacttcctcgtggccttctacgacatgcaccacgacgagaactcctacttctggaaggccaagaaggtgacccgcaacgccgcctccgacctggaggcgttcgtcgagctggtcggcggcggatcctcccaggagaacgcgctggtcgcggccgacgcctacgcctccgacgcgccgccgtccgaggagtcctactccgccgggcgccacgccgcgttccgcgagctgtcggacatcgtcgagcgtccggttgacgcggcgggggaggaccgcgacctgctggggtccgcgctggcccggtcggtctcccgggagggcacccggatacaggtgcaggccgccctcggcggcaacgccgacgagcacgtcccggtgcgtccgggaggtctggtcccgtccgcggacggcatgcactggagcgtcccggccgcacccgccgggacggcggactga

SEQ ID NO: 56 - protein, 548 aa, Actinomadura sp. 21G792
VNDRTDDTDRGERSDRTDENDRTDGRGWTDVSERTETYDRTEEYDVVVVGGGPCGSTVSTLVARQGHRVLVLEKESFPRYQIGESLLPATVHGICKLLGVTEELERAAFTVKRGGTFRWGANPEPWTFAFAVSSHFAGDAATAYQVERMTFDKILLDNARRNGVEVRERVSVVDVVEEDDRVAGVRYVDTGGTRREVRARFVVDASGNKSRIHDRVGGRRHYSEFFRNLALFGYFEGGKRMPAPNEGNILAVAFDAGWFWYIPLGPDLTSVGAVVQPEALDRIRGDREEALRSLIADCPMIADYLSGARRVTEGPYGEIRTRKDYSYIKEAFWKPGMVLAGDAACFIDPVFSSGVHLATYSALLAARSINTVLRGDATEADCFAEFEDRYRREYARFHDFLVAFYDMHHDENSYFWKAKKVTRNAASDLEAFVELVGGGSSQENALVAADAYASDAPPSEESYSAGRHAAFRELSDIVERPVDAAGEDRDLLGSALARSVSREGTRIQVQAALGGNADEHVPVRPGGLVPSADGMHWSVPAAPAGTAD

SEQ ID NO: 57 - DNA, 1383 bp, Actinomadura sp. 21G792
  CDS (1)..(1383)
atgtccgacgtgacactgaggtccgcgcggccggagccgcggccggcggatccggacggcggcgcgggcgaccgcatcccgctgtcgctccagcaggagttcctgcgcatggtcgacaagggggacgaggcggggccgttcggcccgcagtacacgatcgtcggcggctggcgcgtcgagggcgggctggacgtgcccaccctgcgcgacgcgctgcacgacgtcgtcgtccggcacgaggcgctgcgcatgaccgtcgtccgggacggcgacgagcagcaccagcggctgtggcccgcgtccccgcccgacctccgcgtccgggacctgccggccgaccccgcgcaccgcgacgccgccgccgaaaagttcctcaacgaggtcgaggccgggctgttcgcggcggacgaacggccgctgatctgcgccgcgctcggccggttcgacgcgggcgacgcgatgctggtgctgctcgcgcaccacaccctggtcgacgggtggtccatccacgtggtcatgcgcgacctggccgtctgctacgcggcgcgccgggagggacgcgcgcccgagctgccgccggtgcgccagtaccgcgactacgtggcctggcagcgggcgaacgcggacgaacccggcgtggcgatctcccgcgagtactggcgggagacgctggacggggcccggctgctgccgctgcggaccgaccgcgcccgcggctcccgcggctccgacgccacgggctggtaccggttcctgctcgacgaggagttcgacccggcgctgcggcgggtcgccgccgagacgcgcagctcgccgttcatggtgctcctggccgcgtacctgctgtacctgcgggagcggaccggccggaccgacatcgtgctgccgaccttcatgcccggccgcggggagccctggagccacgagctcgtcgggttcttctacaacttcatcccgctgcgcaccgacatcgccggatgcaccgggttccgggacgtgatcgcccgggtccgggcgacctgcctgggcgcgtacgcgcacgaactgccgtccgtccagttcatggacgaggcacccgagctgatggactcggtgtcggatccgcgcaccgccgccgtggtgttccaggtgacgcagtccccgcacatgatgtacggggagcgcatcggcgacctgacctacaccgcggtccgccgccgggtcgtgtccgtgccggtcgggtcggagatcccggacggcgtcctgtgggggctggagacgcacccgtccggcggcatgatcggcagcatcggctacacgaccgagctgttcgacgagaagacggtggcgggaatggccgacgacttccggcgagtgctcgaggagaacctgctcgaccggtga

SEQ ID NO: 58 - protein, 460 aa, Actinomadura sp. 21G792
MSDVTLRSARPEPRPADPDGGAGDRIPLSLQQEFLRMVDKGDEAGPFGPQYTIVGGWRVEGGLDVPTLRDALHDVVVRHEALRMTVVRDGDEQHQRLWPASPPDLRVRDLPADPAHRDAAAEKFLNEVEAGLFAADERPLICAALGRFDAGDAMLVLLAHHTLVDGWSIHVVMRDLAVCYAARREGRAPELPPVRQYRDYVAWQRANADEPGVAISREYWRETLDGARLLPLRTDRARGSRGSDATGWYRFLLDEEFDPALRRVAAETRSSPFMVLLAAYLLYLRERTGRTDIVLPTFMPGRGEPWSHELVGFFYNFIPLRTDIAGCTGFRDVIARVRATCLGAYAHELPSVQFMDEAPELMDSVSDPRTAAVVFQVTQSPHMMYGERIGDLTYTAVRRRVVSVPVGSEIPDGVLWGLETHPSGGMIGSIGYTTELFDEKTVAGMADDFRRVLEENLLDR

SEQ ID NO: 59 - DNA, 1329 bp, Actinomadura sp. 21G792
  CDS (1)..(1329)
gtgtacgcccaaattggagatcgcgtcattgtgctcggcgggagcctgaccgggctgttcgccgcgggggcgctcgccgagagctatcgcgaagtcgtgctggtggaccgggacgaactggtcggcgtgcgggaggcgcgtcgcggtgcgccccaggcccgccacatcaacgggctcctcgccgccggctcgcgggcgatggaggacctgttccccgagatcaccgcgcagatggtcacggccggctgcccgctcaccgacctggcgggcacggtccgctggtacttcaacggacgcgcgctggcgcaggcgcgggccgggctgaccaacgtggccgcccggcggccgatcatggaggcgcacgtccgggagcgggtccagggcttcgggaacgtcgtcttcatggagggctacgacatcctcggcctggtcacgtccacggacgggaccacggtgacgggcgcgcgggtgcagtcccgggccgagggggcggccgaggaggagctgaccgccgacctggtcatcgacgccaccggccgcggctcccgcacgccggtgtggctggagcagctcgggtacggccgggtcgaggaggagggcaccaagatcggcctcgggtacgggacgcggcactaccggccgcgccgcgaggtgttcggcaaggaccactcggtcgtctgcgtggcgtcggcggactccccccggggcgcgatctgcaccaagaccgacgacggcctgctggagctgacgacgtacggcatcctcggcgaccacccgccgctcgacccggagggcttcaccgccttcgtcaagacgctggcggctccggagatccacgaggcgatcatcgacgccgagccgctggacgacccggtgctgttccgcttccccaccacgatgcgccgccggtacgagcgcatgtcccggttcccggcgaacttcctggtgatgggggacgccatctgcacgcccaaccccgtgttcgcccaggcgcagacgctggcggcgctccaggccgtggccctgcgcaagcgggtccgcagcggggtgccgccggagtcgggcgagttcatgcgggtggcgggccgcatcgtcgatccggcctgggagctgaccgagggcatcaacctcaccttcccgggggtcgagggccgccgcaccggcaagctcaagttcatgcactcctacatgcggatgctgcagaccgcggcgacccgcgacgcctccatcaccgaggcgttcatgcgggcggcgggcctggtcgactcgccccagtcgctgatgcggccggggctggcatggagggtgctgcggggcgccggcgcctga

SEQ ID NO: 60 - protein, 442 aa, Actinomadura sp. 21G792
VYAQIGDRVIVLGGSLTGLFAAGALAESYREVVLVDRDELVGVREARRGAPQARHINGLLAAGSRAMEDLFPEITAQMVTAGCPLTDLAGTVRWYFNGRALAQARAGLTNVAARRPIMEAHVRERVQGFGNVVFMEGYDILGLVTSTDGTTVTGARVQSRAEGAAEEELTADLVIDATGRGSRTPVWLEQLGYGRVEEEGTKIGLGYGTRHYRPRREVFGKDHSVVCVASADSPRGAICTKTDDGLLELTTYGILGDHPPLDPEGFTAFVKTLAAPEIHEAIIDAEPLDDPVLFRFPTTMRRRYERMSRFPANFLVMGDAICTPNPVFAQAQTLAALQAVALRKRVRSGVPPESGEFMRVAGRIVDPAWELTEGINLTFPGVEGRRTGKLKFMHSYMRMLQTAATRDASITEAFMRAAGLVDSPQSLMRPGLAWRVLRGAGA

SEQ ID NO: 61 - DNA, 1578 bp, Actinomadura sp. 21G792
  CDS (1)..(1578)
atgacgaaccccgcccaacctcccaaggcagggaggcgggaatggatcgcgctggcagtgctctgcctgcccaccatgttggcggccgtggacatcaacatcatgttcctggccctgccgcacatcgccgaggacctggggtccggcggaacggcccagctgtggatgaccgacatctacggtttcatgatcgccggcttcctcatcaccatggggtccctcggtgaccgcatcgggcgacgcaagctgctgatggccgggtccgcggtgttcctcgtggcctcgctgttcgcggccttcgccacctcgaccgagatgctgatcatctcgcgcgcggtgctgggcgtcgccggcgccacgatcgcgccgtcggtactgggcctgctgcggcagatgttccaggatccgaagcagatgggcgccgccatggggctgtggggcacctcgatcatgctcggctccgtcctcggcccggtcgtcggcgggctgctgctcggcgccttctggtggggatcgatcttcatcatggcggtgccgatcacgggcctcctgctgctgaccggcttcttcctcctgccggagtcgaacaacccgaacgccccgaagctcgacctgatcagcgtcggcatgaccctggcgggcatcctgccgctgatctgggggctcaaggaggcggcccgggagggttggagcgccggttcgatcgccgcggtcgccatcggcgcggtgttcctggtggccttcgtccagcgccagcgcatggtcgagaacccgctgatggacctgagcctgttccgggtgcgcaccctgtcgatcgcgctcctgctggcgctgtcgatcgcgctcgtcatgggcggcctgggcctgatggcgacgcagttcatgcagatgatcctcgacctcagcgcgttccgggtgggggcgtggatgctgctgccggcgatcgcgctgttcatcatcggcaacatgggcacggccctggcccgcaagatccgtccggggatcgtgctggccgggggcgcgctggtcgccgccgtgggcatggtcgtcgtcgcccaggtgaccccgtcgtcgtcgctggcgctgctgctgatcggcatggcgatcgtgttcggcggcggcgggatgatcggcatcatgagcccgttcctggtgatgtcgtcggcgccccccgagaagggcggcgccgcggggtcgtactcgtcgaccgtcggcgagttcggtaccgcgctgggcgtcgcggtcatgggcctgatcggcaccgccgtgtaccgcggccagctcaccgtcccgtccggtgttccggaggaggcggccgaggtggcgcaggagagcatcagcggcgcggtgttcacgagcgaggcgatctccgacgcgcagggcaccgagctgctggcgtcggccgagagcgccttcaccgacagcttccacaccgtggcgtggatcgcggtggtgctgtacgtcggggtggccgccctggcggccttcggcctcaagcacgtccccgccaccggcgaccagccggcggaccccatgggggcgcagggcgtcgagcaggtgcccgacggagtgagctga

SEQ ID NO: 62 - protein, 525 aa, Actinomadura sp. 21G792
MTNPAQPPKAGRREWIALAVLCLPTMLAAVDINIMFLALPHIAEDLGSGGTAQLWMTDIYGFMIAGFLITMGSLGDRIGRRKLLMAGSAVFLVASLFAAFATSTEMLIISRAVLGVAGATIAPSVLGLLRQMFQDPKQMGAAMGLWGTSIMLGSVLGPVVGGLLLGAFWWGSIFIMAVPITGLLLLTGFFLLPESNNPNAPKLDLISVGMTLAGILPLIWGLKEAAREGWSAGSIAAVAIGAVFLVAFVQRQRMVENPLMDLSLFRVRTLSIALLLALSIALVMGGLGLMATQFMQMILDLSAFRVGAWMLLPAIALFIIGNMGTALARKIRPGIVLAGGALVAAVGMVVVAQVTPSSSLALLLIGMAIVFGGGGMIGIMSPFLVMSSAPPEKGGAAGSYSSTVGEFGTALGVAVMGLIGTAVYRGQLTVPSGVPEEAAEVAQESISGAVFTSEAISDAQGTELLASAESAFTDSFHTVAWIAVVLYVGVAALAAFGLKHVPATGDQPADPMGAQGVEQVPDGVS

SEQ ID NO: 63 - DNA, 513 bp, Actinomadura sp. 21G792
  sig_peptide (16)..(111)
  CDS (16)..(510)
  mat_peptide (112)..(507)
ccaggaggagtgcaaatgcccaaactgggcaggcggaccgcgctgctggcggcggccgccaccatgaccaccggactgttcgccgcggcgggcgccgcgcccgccatggcggacaccgtcacggtcaactacgactgcgtcggctacccgtcggacatcgccgtgaccatcgacgcgccggccacggccggcgtgggcgacaccgccaccttcgaggtcagctccgtggtgaccaccggcgccccgcaggacctccccgccggggaggtcgtgaccgacatggcgatcgtggtgggcggtgcccagtccggcaccatcaccgcgagcggcctgacgaacgaggccacccccgccggccagcccgtgaacatggtcggcggcgaggcccagatcacgttcacctcggccggctccgtcaccttcaccccgtccaccaccacccaggtcgacaacggcgcgcagtgcaccgtcgtcggcgaggccccggtcggcgccacgacggtggtctcctag

SEQ ID NO: 64 - protein, 165 aa, Actinomadura sp. 21G792
MPKLGRRTALLAAAATMTTGLFAAAGAAPAMADTVTVNYDCVGYPSDIAVTIDAPATAGVGDTATFEVSSVVTTGAPQDLPAGEVVTDMAIVVGGAQSGTITASGLTNEATPAGQPVNMVGGEAQITFTSAGSVTFTPSTTTQVDNGAQCTVVGEAPVGATTVVS

SEQ ID NO: 65 - DNA, 1386 bp, Actinomadura sp. 21G792
  CDS (1)..(1386)
gtgacgatctcatccacccggccggtgggcgcgatgtccgccgcggaactggaagaactcgaccgccgccatctcgtgcacccgcaccagcggggcgcgtacccggggcgccgcgtcatcgtccgcggcgagggcagcacggtctgggacgccgccgggcgcgagctgctcgacgtgaccggcggcggcaactgggtcgcccaggtcgggcacggccgccgcgagctggccgacgccgccgcggcgcagatgacggagctgggctacttcaccgggttcttcgagttcgccaacgacaagtcgatccggctggccgagcggctggccgcgatggcgcccggcgatctcgaccgcgccttcctgaccagcggcggctcggaggccgtggacaccgccatcaagctggcccggctgcaccaccacaaccggggcgaggcggaccgcacctggatcatcgcccggcagtgggggtaccacggcgcgaccctcggcagcggtaccgcgaccggcttcccgcagatgcaggtgggcgtggggccggccctgccgcacgtcgagaaggtcaccccgccgatgccgttccacaccgagatgtacggcggccaggacccgaccgacttcctcgtcgacgagctggcgcggacgatcgaccgcatcggccccggcaacatcgccgcgatgatcggcgagccgatgctgggcggcggcggcgtggtcgccccgccggccgactactggccgcgggtccgcgcgctgctcgccgagcacggcatcctgctgatcgccgacgaggtgatcaccgcgttcggccggaccggtgtctggttcgactccgcccggcgcggcatggaccccgacatcgtcgtcctggccaagggcctgacgagcggctacgcgcccctcggcgcggtgctgatgcgggaggggatcgccgagaccgtggtcggcggggacgcctacctgcaccacgggcacacctactcgggccacccggtgtcctgcgccgtggcgctcacgaacctcgacctgctggagaaggagcggctgccggagcggtcggcggcgatcggcgaccggctgcgcgccgggctcgcgccggccggcgacctgcccgccgtcggcgagatccgggtggagggcgcgacggtcggcatcgaactggtcgccgaccgggcggcccgcgcgccgatgggccccgaaccggtcgaggccgtcctcgacgagctgtacaacgggcacggcctgatcgtccggaactacgggcccacgctcgtcctggcgccgccgctggtgctcaccgacgcggagacggaccgcgccacctcggcgatcgtggacgtcctgcggcggctggacgccgagaacgcccggatcgcgccgcgctga

SEQ ID NO: 66 - protein, 461 aa, Actinomadura sp. 21G792
VTISSTRPVGAMSAAELEELDRRHLVHPHQRGAYPGRRVIVRGEGSTVWDAAGRELLDVTGGGNWVAQVGHGRRELADAAAAQMTELGYFTGFFEFANDKSIRLAERLAAMAPGDLDRAFLTSGGSEAVDTAIKLARLHHHNRGEADRTWIIARQWGYHGATLGSGTATGFPQMQVGVGPALPHVEKVTPPMPFHTEMYGGQDPTDFLVDELARTIDRIGPGNIAAMIGEPMLGGGGVVAPPADYWPRVRALLAEHGILLIADEVITAFGRTGVWFDSARRGMDPDIVVLAKGLTSGYAPLGAVLMREGIAETVVGGDAYLHHGHTYSGHPVSCAVALTNLDLLEKERLPERSAAIGDRLRAGLAPAGDLPAVGEIRVEGATVGIELVADRAARAPMGPEPVEAVLDELYNGHGLIVRNYGPTLVLAPPLVLTDAETDRATSAIVDVLRRLDAENARIAPR

SEQ ID NO: 67 - DNA, 1227 bp, Actinomadura sp. 21G792
  CDS (1)..(1227)
atgaaggactcagcttcgccgaccgaggcgcccgcggacttcccgatcccgcggccctcgcggtgcccctaccggccctcggcctcccatgtcgaactcggcgcggacggtccgatgacgaaggtgcggttgtacaacggccgcacggcctggctggtgacgggcgccgccgaggcccgcgccgtcctctccgactaccgccgggtgtccatccgcccgtaccacggcaactacccgctgctgaacgaggagttcgagaaggtcgtcgacagcgggtacgccgacgtgctgttcggcgtggacccgcccgagcacacccggcagcggcagatgatcatgccgagcttcacgctgcgccggacggcgaccatgcgggccgacatccagcgcatcgtcgacgaccggctggacgagatggagcgcgggggcaggcagggcgacctcgtgtcgcagttcgcccagccggtgccgtcgatggtgatgagccggctgctcggcgtcccctactccgagcacgaggagttcgagaccccggcccacaagctgttcgtccccgaactggccgaggaggcgacggcggagctgggcgagtacctcgaccggctgatccgcaagaaggaggccgacccggacggcggcgagcgcggcctgctcgacgacctcatcgccgaccacctgcagaaggacgcgctctcccgggacgagctcgtccacatcgcgatggccatgctggtcgcgggcaccgacaccaccaccaacgtgatctcgctgggcacgctggcgctcctcgacaccccgggccagtgggacgcgctgcgcgacgacccggacctgaccgcggccgccgtcgaggagatcctgcgctacgtctcgctggtcgaggcgttcgcccgcgtcgcggtcgaggacatcgacctgggcggcgcgacgatccgcgcgggcgagggcatcctgatcagctgcgcgggggtcaacttcgaccccgccgtgatcgacgcgcccgacgcgttcgacatccgccgcccgccgcgtccgagcttctcgttcagccacggcatccaccgctgcccgggggacaacctggcccggctggagctggagatcgcgtttcggacgctcgtcacgcgcttcccgaacctgcgcgcgaccgtgcccacccccgaactgcgcagcaacaacaacgacggaacccttcagcggctctacgagctgccggtgacctggtag

SEQ ID NO: 68 - protein, 408 aa, Actinomadura sp. 21G792
MKDSASPTEAPADFPIPRPSRCPYRPSASHVELGADGPMTKVRLYNGRTAWLVTGAAEARAVLSDYRRVSIRPYHGNYPLLNEEFEKVVDSGYADVLFGVDPPEHTRQRQMIMPSFTLRRTATMRADIQRIVDDRLDEMERGGRQGDLVSQFAQPVPSMVMSRLLGVPYSEHEEFETPAHKLFVPELAEEATAELGEYLDRLIRKKEADPDGGERGLLDDLIADHLQKDALSRDELVHIAMAMLVAGTDTTTNVISLGTLALLDTPGQWDALRDDPDLTAAAVEEILRYVSLVEAFARVAVEDIDLGGATIRAGEGILISCAGVNFDPAVIDAPDAFDIRRPPRPSFSFSHGIHRCPGDNLARLELEIAFRTLVTRFPNLRATVPTPELRSNNNDGTLQRLYELPVTW

SEQ ID NO: 69 - DNA, 1146 bp, Actinomadura sp. 21G792
  CDS (1)..(1146)
atgtcagcacacaccgaacggggcgccgcgcggaccgggccggagctgcgcggcgtcgcctacgacaccggtaccaacttcgccaccggtcagggcgacctctcgcggacgtcgtggagcggcccgcagatgcaggaggagatcgcggcgatcgccgaccagctcaactgcaactcgatcaccgtgtacggcagcgacatggaccggttgcgggagacggccgtcgcggcgctcgaccgggacctgcacgtgcggctccagccccgcctggtggaccgtccgcaggcggaggtcctggagcacctcgccgaggccgccgcgctcggcgagacgctgcgcgcggacggcggccgggtcgagctgacggtcggcgccgtgcacctgctgttcacccccggcatcgtccccggtgaccagtaccacgagcggatggccaacatctacgccgacgccgaccaccacctgctcaccccgaccgacacggtcgacacggcggccgcggcgccccggctcaacgagttcctggggcgggccgccacggtggcgcgcggcgcgttccacgggccggtcagctactcggccgcgcatttcgaggacgtcgactggacgccgttcgacctgatcggcctgatgtaccagtacctgccgaaggcccggacgcgcgcggggcacctcgacctgatcggcggctaccgcaggtggggcaagccgatcctcatcgccgagttcggcaccgcgacctaccgcggcgccgaggacaaggcgttcttcttctgggacatcgtcgaccgtgccggggagccgccggtgatcctgcccggccacgtccgggacgaggcggcccagtcggcctaccacctggagatgttcgacgtcttcgaggaggcgggcgtgcacggggtggcggtgtcggagttcatccacccgacccatccgcacaccaccgacgagaccctcgacctggacatggcgagcatggccatcgtgaagaccatccgcgacgacttcggcgacccggcctcgtcctaccgctgggagccgaaggagtcctaccacgccatcgccgactactacgcccacgtgggtttccaggccgccgcccgcgcggggtccgccgccggcgaggcgatcgggagccggtcatga

SEQ ID NO: 70 - protein, 381 aa, Actinomadura sp. 21G792
MSAHTERGAARTGPELRGVAYDTGTNFATGQGDLSRTSWSGPQMQEEIAAIADQLNCNSITVYGSDMDRLRETAVAALDRDLHVRLQPRLVDRPQAEVLEHLAEAAALGETLRADGGRVELTVGAVHLLFTPGIVPGDQYHERMANIYADADHHLLTPTDTVDTAAAAPRLNEFLGRAATVARGAFHGPVSYSAAHFEDVDWTPFDLIGLMYQYLPKARTRAGHLDLIGGYRRWGKPILIAEFGTATYRGAEDKAFFFWDIVDRAGEPPVILPGHVRDEAAQSAYHLEMFDVFEEAGVHGVAVSEFIHPTHPHTTDETLDLDMASMAIVKTIRDDFGDPASSYRWEPKESYHAIADYYAHVGFQAAARAGSAAGEAIGSRS

SEQ ID NO: 71 - DNA, 1230 bp, Actinomadura sp. 21G792
  CDS (1)..(1230)
atgaccgtttcggacgtgagcacctccgggcttccggagtacccgctcgccagggagtgcccgcaccgtccgggcctcgggaccgcgagcctccgcgagccggggccgatgacgaaggtgcggctgtacgacggccgcaccgcgtggctggtcaccggcgccgaggaggcgcggtcgctgctggccgaccagcggacctccgtgcgcccgcacccgaacttcccggtgctgaacgaggaactgacgcagatgcgggccacccgggagatggccgtcgaggaggagggcgggttcgcgtccgcgctgttcggcgtcgacccgcccgagcacagccgccagcggcaggtgctcgtcccgcagttcagcgccaagcgcgtggcccggcagcgtccgaacatccagcgcatcgtcgacgagcagctcgacgcgatggtgcggcagggcgccccggccgacttcatcaccgcgttcgccgagccggtgccgacgaaggtggtctgcgcccacctcggcgtcccgttctccgagcacgccgccttcggcgagttcgcgagcaagctgttcgacccggtggacgccgacgcggcgatggacgggctggtcgcctacctcgacgacctggtgcggcgcaaggagagcgagcccggtaccggcatgctcgacgcgctgatcgccgagcacgtccttccgggccgggtcgagcgcagcgagctggtgcagttcgccctggccgtgctggtcgccgggaccgtcaccaccaccagcaccatcgcgctgggcacgctggcgctgctggacgcccccggcgcgtacgcggcgctgcacgccgacccgagcctggcgcccggggcggtcgaggagatcctgcggtgggtgtcgctcgtcgagcagatctcgcgggtggcgctggaggacatcgagctgtccgggcggaccatcgaggcgggggacgggctcctcatcagcaccgccggcgccaactggggcccggacgtgacgacccaccccgaggagttcgacatcacgcggccccccgggcggcacctctccttcggccacgggatccaccactgcctcggccggaacctcgcgcggatggagctggaggtggtcttcgagacgctgacccggcgccttcccgggctgcggtcggtgatgccgaccgcggagatccccgcgcagcacgacgggaccgtgcagaagctcctctgcttccccgtcacctggtaa

SEQ ID NO: 72 - protein, 409 aa, Actinomadura sp. 21G792
MTVSDVSTSGLPEYPLARECPHRPGLGTASLREPGPMTKVRLYDGRTAWLVTGAEEARSLLADQRTSVRPHPNFPVLNEELTQMRATREMAVEEEGGFASALFGVDPPEHSRQRQVLVPQFSAKRVARQRPNIQRIVDEQLDAMVRQGAPADFITAFAEPVPTKVVCAHLGVPFSEHAAFGEFASKLFDPVDADAAMDGLVAYLDDLVRRKESEPGTGMLDALIAEHVLPGRVERSELVQFALAVLVAGTVTTTSTIALGTLALLDAPGAYAALHADPSLAPGAVEEILRWVSLVEQISRVALEDIELSGRTIEAGDGLLISTAGANWGPDVTTHPEEFDITRPPGRHLSFGHGIHHCLGRNLARMELEVVFETLTRRLPGLRSVMPTAEIPAQHDGTVQKLLCFPVTW

SEQ ID NO: 73 - DNA, 699 bp, Actinomadura sp. 21G792
  CDS (1)..(699)
atggaacggctcaacccccatcgggcgaccgacgacctggtccggcacttccgggcgggccccggcgaggtcgccgagggcgacgtcttcaacggcgtccgcatgggcgacatcttcaagctggccaaggaattcgtcgggatgccctgcgccgagatcgagaagctgctcgaggaccaggtgcacgaggtgcgcgtcggcgcgctcagcatcatgggcaaggacgccacccgcaagaagatcaccatggagcgccgcaaggagctctacgagctgtacctgcgccgcatcgaccgggtcaaccattgggacctggtcgacctgagcagccaccacgtcatcggcggctacctgtacgaatccggggacccccgcggcgtcctgtacgaactcgcccggtccgacaacttgtgggcgcggcgcatcgccgtgttcagcaccatgtacttcgtccgccgcggcgacctggacgacactttcgaaatctcggaaattctcgcctacgacgaccaggacctggtgcagaaggccgtcggcggaatgctccgcgaggcgggcaagcaggaccgcccccgcctgctctccttcctcgacgagcacgccgccggcgcaccgcgcatcatgctgcgctacgcgatcgagcatctcgacaagccgcagcgcactcactacctgaacctgggcaagcaggcccgctga

SEQ ID NO: 74 - protein, 232 aa, Actinomadura sp. 21G792
MERLNPHRATDDLVRHFRAGPGEVAEGDVFNGVRMGDIFKLAKEFVGMPCAEIEKLLEDQVHEVRVGALSIMGKDATRKKITMERRKELYELYLRRIDRVNHWDLVDLSSHHVIGGYLYESGDPRGVLYELARSDNLWARRIAVFSTMYFVRRGDLDDTFEISEILAYDDQDLVQKAVGGMLREAGKQDRPRLLSFLDEHAAGAPRIMLRYAIEHLDKPQRTHYLNLGKQAR

SEQ ID NO: 75 - DNA, 1401 bp, Actinomadura sp. 21G792
  CDS (1)..(1401)
atgcgggtcctgttcgtcgtctacccttcccacgcgcatctctggccggccgtgccgaccgcgtgggcattgcaaagtgccgggcacgaggtccgtgtcgccacccatgcgaatttcagcgcgtcggtcacggcggcgggactgacccccgtccagctcggtgacgccgacgcggtcgaggcgcgcatgcggcccgacgccaagccgcccgcgcggcccgaggaggtgctccacttcgcggacgtgctcgggctgaacgagcgggagcgcgagaactggatcccctactaccagtggctgctgaacccgatctcggactacgtccgcacggacctgcccgaggcgggcgacctcatcgacttcgcgtgcgcctggcggcccgacctgatcgtctgggaccccaccttcgcgtccggtcccgtggcggcacggctctgcggcgccgcgcacgcccgcatggtgctgggccccgactacctctcgtggagcttcgaccggctcgccgagcgccgcgacgcggtccgggccgcgggcctgcccgagagcccccagcacgagctgctgcgcccgctcgccgagaagcacggcgtcgagctcgacgacgagctgctgtacggccagtggtcgctggaccccatgccgccgggcatgcggctgccgacgagcgggatcacggtgccgatgcgctacgtgccgtacaacggcgccgagatcatgccgaagtggctgtacgagcggcccggccggccgcgggtcgcgctgacgctgggggagtccacccgccggttcatcaagggcgactggggccgcaccccgaagatcttcgaggcggtggccggcctcgacatcgaggtggtcgccacgctcaacgacctgcagatggaggggatcgatcggctgcccgacaacgtccgggcgatcgaatgggtgccgctgacccacctcctgcccacgtgcgacgtgatgatcaaccacggtggcatcgggacgaccgcggcggcctgggggctgcggacgccgcagatcgtctgcgacaccgacgacagcctgatgatgcgtcccgtcgaggtcgacccccggaccatggaggacggcacgtaccgcgtcggcttcgagttcggcgtgcgggaggaggtcgagatggtcaccacctgggagctgccgcccaagaagctggaggccggcccgacgtcggactacatcgtgtcgcgcggcgcgggcgcccggctggaccacacgaagctgtcggtcgccgaggtcgccgacgtgatcggctccgtggtggaggacccggcgtaccgcaagggcgcgcaggacgtgtacgacgagtggctcggcctcccgagcccggccggcatcgtgccgcagctggagcagctgacggcagagcaccggcggtga

SEQ ID NO: 76 - protein, 466 aa, Actinomadura sp. 21G792
MRVLFVVYPSHAHLWPAVPTAWALQSAGHEVRVATHANFSASVTAAGLTPVQLGDADAVEARMRPDAKPPARPEEVLHFADVLGLNERERENWIPYYQWLLNPISDYVRTDLPEAGDLIDFACAWRPDLIVWDPTFASGPVAARLCGAAHARMVLGPDYLSWSFDRLAERRDAVRAAGLPESPQHELLRPLAEKHGVELDDELLYGQWSLDPMPPGMRLPTSGITVPMRYVPYNGAEIMPKWLYERPGRPRVALTLGESTRRFIKGDWGRTPKIFEAVAGLDIEVVATLNDLQMEGIDRLPDNVRAIEWVPLTHLLPTCDVMINHGGIGTTAAAWGLRTPQIVCDTDDSLMMRPVEVDPRTMEDGTYRVGFEFGVREEVEMVTTWELPPKKLEAGPTSDYIVSRGAGARLDHTKLSVAEVADVIGSVVEDPAYRKGAQDVYDEWLGLPSPAGIVPQLEQLTAEHRR

SEQ ID NO: 77 - DNA, 858 bp, Actinomadura sp. 21G792
  CDS (1)..(858)
gtgacccgggcccccgggcgcgaaccggccgcggggctgctggcggtgcccggcgccgatctctactacgagatccgcggcgccgggcccgccctgctgctgatccccacgggcaacggtgacgccggaccctacgcgccgctggcggacgcgctggccgaccgccacaccgtcatcacctacgaccggcgcggctactcccgcagcccgatgcacgccccggtcgacggcgcgcggcgcgtcgcggtcgacgcgcgcgacgcgagcctgctgatcgagcggctggccgccgggcccgccgccgcgctgggcggcagttccggcgccgtggtcgccctcgcgctgctggaacgccacccggacaccgtgcggacgctcgtcgcgcacgagccgccgctggcctcggtgctgccggacgcggccgaatggcgccggttctacgccgacctgtacgacacgtaccggcggatcggcgcgcgtccggcccgcgcggagttccgcgcccggatggggatgaccggggacacccggccgccggaggaggcgcagccgccgcccgcggagctggagcggatgctcggccggatccggggcaacctggaccgctggttcgaggaggaactccgcccctacccgtcctaccccctcgacacggcggcgctgggacgggtcgcgggccggctcgtcctggcgggcggccgcgactcgcgcgaccaccacccctacgagcccaacaccgtgctggcgaagcggttcggcctcgacatcgcggacttccccggcggccacgtcggctacgtgacccaccccttcgagttcgccgaacggctcgcggaggtgctcgccggggcccgctga

SEQ ID NO: 78 - protein, 285 aa, Actinomadura sp. 21G792
VTRAPGREPAAGLLAVPGADLYYEIRGAGPALLLIPTGNGDAGPYAPLADALADRHTVITYDRRGYSRSPMHAPVDGARRVAVDARDASLLIERLAAGPAAALGGSSGAVVALALLERHPDTVRTLVAHEPPLASVLPDAAEWRRFYADLYDTYRRIGARPARAEFRARMGMTGDTRPPEEAQPPPAELERMLGRIRGNLDRWFEEELRPYPSYPLDTAALGRVAGRLVLAGGRDSRDHHPYEPNTVLAKRFGLDIADFPGGHVGYVTHPFEFAERLAEVLAGAR

SEQ ID NO: 79 - DNA, 1647 bp, Actinomadura sp. 21G792
  CDS (1)..(1647)
atgaccagcattccgcacatgatcccctggcccgccgaggcggccgcccgctaccgggcggcgggctgctggctgggccgcccgctgggcgagcacatgtggcgctgggcggacgactggggcgaccgggtcgccgtggtcgacggcgacgtccggctgacgttccgcgacctggcggtccgggccgacgcgctcgcccgcgggctcgccgagcgcggcctcgggcgcggcgacaccgtcctcgtccagctccccaaccgctgggacttcgtcgtgacggcgctggcctgcttccggctcggcgtcgcgccggtcatgatgctgccgccgcaccgcgagtacgagctgacctccatcggacggcacgtcgcggccaaggcgctgatcgtccccgaccggtggcgcggcttcgaccaccgggcgctcgcgcaccgggtcgccgccgcgctgccggagccgccgctggtggtggtcatgggcggcggcccgcaccccggggacgtcgccgggcacgagctgatcctgcgggacggcgacgtcgccgggcggcggcgctggctggacgagcgggcgcccgatccgggcgacgtggcgctgttcctgctgtcgggcggcaccacgggcgtgcccaagctcatcaaccggacgcacgacgactacgagtacaacatgcggtgcagcgccgcggcctgcggtttcggccccggcaccgtctacctggcggtactgccggtcgggcacaacttcccgctggccagcccgggggtgttcggggcgctgtcgtccggcgggcgggcggtgctgctgccctcgccgcggtccgacgcggtcttcgccgcgatcgaggcggagcgcgtgacgacgacctcggccgtcccggcggtcgcgctggcgtgggcggaggcggccgggacgacccggcgcgacctgtccagcctgcggcacgtccacgtcggcggctcgatgctgtcgcccgaggtggccgcgaccatcggccccgcgctgggctgccggctgcagcaggtctacggcatggccgagggcctcatctgctacacgcggccggacgcccccgacgagatcgcccacgcgacgcaggggacgcccgtcagcccgcacgacgaactgctcgtcgtggaccacgacggccgtcccgtcccggccggcgcgatcggcgagctgctcacccgcggcccgtacacgccgcgggggtacttcggggcgcccgtccagaaccgcgagtcgttcaccccggacggctggtaccgcaccggcgacctggtgcggatcaccgccgaggggaacgtcgtggtgtgcgggcgcagcaaggacctgatcaaccgggccggggagaagatcgccgccggcgagatcgagaccctggtccaggagctgccgcaggtggccgaggccgccgcggtcgcggtgccggacccggccgtcggcgagcgggtctgcctggtcgtccggctgcaccccgggcacgccctgacgctggcggaagtggccggagcgctcaccgcgcgcggcctcgccgccttcaagatccccgagcgcctggagatcctggaccggctcccgcacacgcccgtcggcaagcccgacaagccggcgctccgcgacctcgtcaccgccccgacccgctga

SEQ ID NO: 80 - protein, 548 aa, Actinomadura sp. 21G792
MTSIPHMIPWPAEAAARYRAAGCWLGRPLGEHMWRWADDWGDRVAVVDGDVRLTFRDLAVRADALARGLAERGLGRGDTVLVQLPNRWDFVVTALACFRLGVAPVMMLPPHREYELTSIGRHVAAKALIVPDRWRGFDHRALAHRVAAALPEPPLVVVMGGGPHPGDVAGHELILRDGDVAGRRRWLDERAPDPGDVALFLLSGGTTGVPKLINRTHDDYEYNMRCSAAACGFGPGTVYLAVLPVGHNFPLASPGVFGALSSGGRAVLLPSPRSDAVFAAIEAERVTTTSAVPAVALAWAEAAGTTRRDLSSLRHVHVGGSMLSPEVAATIGPALGCRLQQVYGMAEGLICYTRPDAPDEIAHATQGTPVSPHDELLVVDHDGRPVPAGAIGELLTRGPYTPRGYFGAPVQNRESFTPDGWYRTGDLVRITAEGNVVVCGRSKDLINRAGEKIAAGEIETLVQELPQVAEAAAVAVPDPAVGERVCLVVRLHPGHALTLAEVAGALTARGLAAFKIPERLEILDRLPHTPVGKPDKPALRDLVTAPTR

SEQ ID NO: 81 - DNA, 5241 bp, Actinomadura sp. 21G792
  CDS (1)..(5241)
atgaactcccccgaacccatcgccatcgtcgggatggcatgccgcttcgccgggggcgtcgggtcgccggccgagttctgggatctgctgcgcaccggcggcgacgccgtcggggaactgcccgcgggccgctgggacgggtacgccgcccgcgaccaggagcacgcggacgcggtgcgcgacgtgaccaggcgcggtgcgttcctcgacgatgtcgagggcttcgacgccgacttcttcgacatcaccccgcgcgaggcggaactgctcgacccgcagcagcggatcatgctggagctggcctgggaggcactggagcacgccgggatcccgcccgcggacctcgccggttcggacgcgggcgtgttcgtgggagtcggctccgacgactacggccggcggctgctcgaggacctgccccgcatcgaggcgtggacgggcatcggcggctcgtactgcggggtcgccaaccgcgtgtcgtacacgctggacctgcgcggccccagcatggcggtggacaccgcgtgctcgtcgtccctcgtgtcgatccacctggccgcgcaggcgctgcgcgcgggcgagtgcccggtggccctcgcgggcggcgtcctggtcatggccgcgccggggctgtcgatggtgctggacgcggcgggggcgctggcccccgacgggcgcagcaagtccttcgacgccgccgccgacggctacggccgcggggagggcggcgggttcgtcgtgctcaagcggctggcggacgcgcggcgcgacggcgaccgggtgctcgcggtgctgcgcggcagcgccgtccaccaggacggccgcaccaacggcatcatggcgccgagcggcgaggcccagatccacctgatgcggcgcgcctgccgggccgccgggatcgacccggccgaggtcggctacgtggaggcccacgggaccgggacgcgggtcggcgacccgatcgaggcggcggcgctcggcacggtgttcgccgagggccgtcccgccgaccgtccgctgctgatcggctcggtcaagcccaacgtcgggcacctggaggccggggcgggcgtggccggggtgatcaagacggtgctggccctccagcacggcgagatcccgccgagcccgcacatcggcacaccgaatcccgcgatcgcgtgggacgagctgcggctgcgcgcggtcaccgggccggtcgcgtggccggacaccggcggcccgcggctggcgggcgtctcgggctacggctacggcggcacgatcgcgcacctcctgctggaggccggggacccgcccgtcccggccgacgccgccgacgccggcggcaccggcgagaccggcgcggcggacgcccgcctcgcggtctaccccctgtcggccgccgatccggccgcgctcgcccggcacgccggacggctggccgaccggctgtcgcggcccggcgcccccggcacggccgacaccgggttcacgctggcccgccgccgcccccggctgccccaccgcgccgtggtcgtcgccgggaaccgcgccgagctggtcgaacggctccgggagctcgccgcgggcgggcaggacgccggcaccgccgcggtcccgaccgggtcggtgctgccgggcgccgagcgcggtccggtctgggtgttctccgggcagggctcgcagtggaccggcatggggcgcgagctgctcgccgaggagccggtgttcgccgaggtcatcgagcggctcgaaccggtcttccgcgccgagctggacgtgtcgccgcgggccgtgctgctggacgacgccccgcggcccacctcggtcgtgcagccgatgatcttcgcgatgcaggtggcgctcgcggcggtgtggcgggcgcacggggtgcgtccgggcgccgtcatcggccactcggtcggggagatcgccgcggccgtgaccaccggggtgctctccctggaggagggcgccgcgctcgtctgccgccggtcggtgctgctgcgccggctggaggggcgcggcgcgatggcgatggtcgcgctgccgccggaggaggccgaacgccgcctcgccggccgccgcgacgtcgccgtcgccgtcgccgcgtcccccggctcggccgtcctgtccggtggcgccgccgcgatgcgggagctcaccgagcagtggggcgcgcagggggtgcggatccgtccggtggactccgatgtcgcgttccacagcccgcaggccgacccgctgtgcgccccgctggccgccgcggcgtccgacctgcgcccccgtacgccccggatcccgctctacacgaccgcgctggacgaccccagggacgacgcgccccgggacggcgcgtactgggccgcgaacctgcgcgcccccgtccggttcgccgccgccgtggcggccgccgccgaggacgggtacacggtgttcctggaggtctccccgcatccggtggtggagcactccatcgtcgagacgctcgacgcgcacggcgtcacggaccacctcgtggcccacacgctgcgccgcgcgcggcccgaacgcgcggccctgctcgccaatctggggctgctgagctgccacggcgcggaggtggactggtccgcgtgctggcccggcggcgcacccgccgacctgcccgcgacgccctggcggcaccggccgtactgggcggcggcccccgagggcgggacgccggtcaccggacggcacgatcccgccgggcacacgctgctcggcggccggaccaggatgaacggcaccacccccgcgcacgcctggctcacccgggtcgaccggacgtcccgcccctacccgggcgagcacccggtccgcgaggtggagatcgtcccggcggcggtgctgctgaccaccttcctgaccgcggcggcggcgacggccgggtggtcggacctggccgacgtggcgctgcgggtgccggtcagcctgacccgtccccgcgacgtccaggtcgtcctccaggacggcacgctgcggctgtcgtcccggatggccgacggcgacccggacgacaagggctgggtcacccacacgacggcggccgtcgaaccgcactccgacccggcgccggacggcgggccggtcgcggcgggcaccccgctgcccccgagccacgtggtcgaccggctcggcgcgctcggcgtcgcgggcatgggcttcccctggacggtggagcggatccgggcgggcgagggcgtcctggccctcaccgtgcgggcgggggacgcggcgggtccgggcgacccggcgaaggcgacgtgggcgccgatcctggacgccgcgatgtcggccggatccgtcgcgctccccgatcccccgaccctgcggatgcccgcgcggctccaccggctgtcgctgccgcaagccccgcccgtccgggccgacctcgtgatccgggtgaccggcgagaacacggtggacgtggagatcctcgcccccgagggcgggacgctgggcacgctgaccgggctgcgctacggcgagctggacggggaggccggggcggtcgccaacccgcgccggctcgtccacgagatcacctggcgggcgcccgacggcgccgcggaccgcaccgccgcgccgtccggcgtggtgctggtgggcccgcgcagcgccctgcgcgacgcgctcgccgaggggctcgcccggaccgggacgccgcaccgggtggcgtcctcgccgagcgggctccgggacgccgccggggagccgcccggcgaggtgctggtggtgccgcggcccggccgtcccggccgggtggagcaggacgcgggcgccgcgacccgcctgctggcgcgcacggtccggacgctcgcggcgggcaccggccgcgcgtcccggctgtggtgcgtcacccagggcgtccgggagtgcgccggcccggccccgctcggccacgcgccgctgtgggggctggcgcggatcatcggcgcggagcaccccgacctgtggggcggcgtcatcgacgtcgacggcgtcccggacgtgcccgcggtcctcgacgtgctgcgcgggaccggcggcgaggacgtcgtcgcggtccgcgacggcggcctcctggtgccgcggctgcggttcccggagggcgaccccgtccgcgcgccgatcagctgccggcccgacggcacctacctgatcaccggcgggctcggcgtcctcggcctggaggtcgcgcagtggctggcggcccgcggcgcccggcgcctggtgctggccggacgccggacgctgccgccccgcgactcctgggacgagctcaccgacccggccgacgtggcgcgggtgcgggcgatccggtcgctggagcggctcggcgtcaccgtggtcgtcgtcacggtggacgtcgcggacgcggagacggcgggcaagctgctgtcgcccgccgcgctggggctgccgcccatccgcggcgtcgtgcacgccgccggggtggtcgacaaccggctgctgcgcgacctggacggcgagtcgctgcgcgccgtccagcggcccaagatcggcggcgcgctggtgctgcactcgctgttcccgccgggcgaaccggacttcttcgtgctgttctcctcctgcgggcagctcctcgggctgcccggccagggcgcctacgcggcgagcaacgcgttcctggacgggctggcggcccaccggcgcaacgccggcgacaccgggacgatcagtttcggctggacctcgtggcgcggcctcggcatgtcgcggtcgtccgccgtcatcgacgaggagctggccgcccgcggcacggccgacatcagccgcgccgaggcgttccaggcgtgggagctggccgaacggtacgacctcgggtacgccgccgtcctgcgcacgatcccgctggaccccggccggcggcggccgccgctgttcgacgacctgcccgccgagcccgccgacgccggggtcgcggccgcggcggccccctgggcgggactgcacgggccggagctgcgggacttcctgcacgccgagatcacccgccgggtcgccgcggagaccgggctcggcgcgtccgacgtcgaccccggccggccgctggtcgagatgggcgtcgactcggtgatgaccgtccggatccgccgcgggctggagcgcggcctgcaccggccgctgcccgcgaccctgttctgggaccggcccaccgtcgaggcggtcgccgagttcctcgccgacggcctcgacgccgccgggtccgccgtcgaggaggcgagcgcatga

SEQ ID NO: 82 - protein, 1746 aa, Actinomadura sp. 21G792
MNSPEPIAIVGMACRFAGGVGSPAEFWDLLRTGGDAVGELPAGRWDGYAARDQEHADAVRDVTRRGAFLDDVEGFDADFFDITPREAELLDPQQRIMLELAWEALEHAGIPPADLAGSDAGVFVGVGSDDYGRRLLEDLPRIEAWTGIGGSYCGVANRVSYTLDLRGPSMAVDTACSSSLVSIHLAAQALRAGECPVALAGGVLVMAAPGLSMVLDAAGALAPDGRSKSFDAAADGYGRGEGGGFVVLKRLADARRDGDRVLAVLRGSAVHQDGRTNGIMAPSGEAQIHLMRRACRAAGIDPAEVGYVEAHGTGTRVGDPIEAAALGTVFAEGRPADRPLLIGSVKPNVGHLEAGAGVAGVIKTVLALQHGEIPPSPHIGTPNPAIAWDELRLRAVTGPVAWPDTGGPRLAGVSGYGYGGTIAHLLLEAGDPPVPADAADAGGTGETGAADARLAVYPLSAADPAALARHAGRLADRLSRPGAPGTADTGFTLARRRPRLPHRAVVVAGNRAELVERLRELAAGGQDAGTAAVPTGSVLPGAERGPVWVFSGQGSQWTGMGRELLAEEPVFAEVIERLEPVFRAELDVSPRAVLLDDAPRPTSVVQPMIFAMQVALAAVWRAHGVRPGAVIGHSVGEIAAAVTTGVLSLEEGAALVCRRSVLLRRLEGRGAMAMVALPPEEAERRLAGRRDVAVAVAASPGSAVLSGGAAAMRELTEQWGAQGVRIRPVDSDVAFHSPQADPLCAPLAAAASDLRPRTPRIPLYTTALDDPRDDAPRDGAYWAANLRAPVRFAAAVAAAAEDGYTVFLEVSPHPVVEHSIVETLDAHGVTDHLVAHTLRRARPERAALLANLGLLSCHGAEVDWSACWPGGAPADLPATPWRHRPYWAAAPEGGTPVTGRHDPAGHTLLGGRTRMNGTTPAHAWLTRVDRTSRPYPGEHPVREVEIVPAAVLLTTFLTAAAATAGWSDLADVALRVPVSLTRPRDVQVVLQDGTLRLSSRMADGDPDDKGWVTHTTAAVEPHSDPAPDGGPVAAGTPLPPSHVVDRLGALGVAGMGFPWTVERIRAGEGVLALTVRAGDAAGPGDPAKATWAPILDAAMSAGSVALPDPPTLRMPARLHRLSLPQAPPVRADLVIRVTGENTVDVEILAPEGGTLGTLTGLRYGELDGEAGAVANPRRLVHEITWRAPDGAADRTAAPSGVVLVGPRSALRDALAEGLARTGTPHRVASSPSGLRDAAGEPPGEVLVVPRPGRPGRVEQDAGAATRLLARTVRTLAAGTGRASRLWCVTQGVRECAGPAPLGHAPLWGLARIIGAEHPDLWGGVIDVDGVPDVPAVLDVLRGTGGEDVVAVRDGGLLVPRLRFPEGDPVRAPISCRPDGTYLITGGLGVLGLEVAQWLAARGARRLVLAGRRTLPPRDSWDELTDPADVARVRAIRSLERLGVTVVVVTVDVADAETAGKLLSPAALGLPPIRGVVHAAGVVDNRLLRDLDGESLRAVQRPKIGGALVLHSLFPPGEPDFFVLFSSCGQLLGLPGQGAYAASNAFLDGLAAHRRNAGDTGTISFGWTSWRGLGMSRSSAVIDEELAARGTADISRAEAFQAWELAERYDLGYAAVLRTIPLDPGRRRPPLFDDLPAEPADAGVAAAAAPWAGLHGPELRDFLHAEITRRVAAETGLGASDVDPGRPLVEMGVDSVMTVRIRRGLERGLHRPLPATLFWDRPTVEAVAEFLADGLDAAGSAVEEASA

SEQ ID NO: 83 - DNA, 1047 bp, Actinomadura sp. 21G792
  CDS (1)..(1047)
atggtcgacagtcgcaccgtcaccgtctccgaggcggactatctacgcctcatcattcacggcacgaccgccttcgaattgcttcgcaccgctctggaattcgagctcttcgagctgctcgagacggccggtggaatggacgtcgcggagacggcggcggcgctcggcgtcgacgagcagccggcccgcatcctgctgctgggcctgacctcgatgaagctgctggagcggcgcgaggacggctacgccaacagcgccgtggcccgggaccggctgctgcggtccggacgccgcttcctcggcccgctcgtcgacgtgcaggccgaggtcatcaaccgggccctccccgacttcgccgaggcgatgcgccggaacaccaacgtgggcctgcgccacatcaccggccccgggacgacgctgtacgagcggctcaccgcgcacccggacctgcagcggatcttctacgccaacatgggggacgcgtcccggtacgccttcgcccagctcctcgacctgtacgacttctccggcgtccggcacgtcctggacctcggcggcggcgacggcaccaacagcctccacctggcccggcgccgtcccgggctcgaggcgacggtgttcgaccaggagagcgtggtgcgcctggccgccgaccggatcgaggacccggacctgcgcaagcgcgtccacttccacgccggcgacctgttcgccgacccgttcccggacggctgcgacgcgatcctgtacttccacatcttcgagatctggtcgctggagcggaacaccgagctgctgcgcaagtgccacgcggcgctgcccgaggggggcgtgtgcgtggtctacaacttcacgtccgacgacgccggcaccggcccgatgagcgccgggctcgtgtccccgtacttcctcaccctcgcctcgggcgaaggcatggcctacgcgccggacgacatggagcgggccgtccgggacgcgggcttctcccgcgtcgaccgccgccaggacctcggtttcggccacacgctcgtcgtcggccgcaagtga

SEQ ID NO: 84 - protein, 348 aa, Actinomadura sp. 21G792
MVDSRTVTVSEADYLRLIIHGTTAFELLRTALEFELFELLETAGGMDVAETAAALGVDEQPARILLLGLTSMKLLERREDGYANSAVARDRLLRSGRRFLGPLVDVQAEVINRALPDFAEAMRRNTNVGLRHITGPGTTLYERLTAHPDLQRIFYANMGDASRYAFAQLLDLYDFSGVRHVLDLGGGDGTNSLHLARRRPGLEATVFDQESVVRLAADRIEDPDLRKRVHFHAGDLFADPFPDGCDAILYFHIFEIWSLERNTELLRKCHAALPEGGVCVVYNFTSDDAGTGPMSAGLVSPYFLTLASGEGMAYAPDDMERAVRDAGFSRVDRRQDLGFGHTLVVGRK

SEQ ID NO: 85 - DNA, 1182 bp, Actinomadura sp. 21G792
  CDS (1)..(1182)
gtgtcgaccagtgcggtccccacccggaaagaactcgtcgcgcgggcggccgaattggcgccggtcctgcgctccaacagtgcctggtcggagaagaaccggcggttgcacgacgagtcggtccaggcgctcgccgacgcgggactgttcagaatgcgcatgcccgcccggtacgggggctacgagtgcgacacccggacgctggtcgaggtggccgccgaactggggcgcgccgacggctccgccgcctgggtggcgtcggtgtactggatccccgggtggatgacgtgcctgttccccgacgaggtccaggacgaggtgttctcgacccccgacgtgcgggtgtgcggaacgctgagcccgagcgcgatcgccgagccggtggacggcggcgtcgtcgtcaccggcaagtggggcttcatcagcggcgcccaccacgccgagtggcaggagatcatcgcgatcctgacgcccgaggacggcgagccgtacccggtgatggggctggtccccctgtcggagctgctggtcgtggacgactggaacacctcggggctgcgcggcacgggcagcgtcagcacggtcgcccgggacctgttcgtcccgcaggagcgggtcctgccgctgccggccgtcctgcaggggcagccggcgtccgcgcgcaacgccggaacgccgatctaccgggtgccgctgctgcccgtcgcgtccgcctcgtcggtcggcgccgtgctggggatggcgtacgcggcccgtgacgccttccacaagcgcctgcccggccgcaagatcacctacaccgggtacgagagccagcgcgacgcgacgatcacgcacctgcagatcgccgaggcgacgatgaagaccgacgaggcggagttccacgcctaccggctcgcggacctggtcgacgccaaggccgccgagggcacgccctggaagctggaggaacgcgcgcaggtccgggcggacctcggcgccgtctgccgcctcgccaaggaggccgtggacgtcctggcctccgcaagcggcggatcgtcgatctacgaggacgtgccgatccagcggatcctccgcgacgtccaggccgtcaaccagcacgccctgatgaacccgaacaccaacaccgagctctacggccgcgtgctgtgcggcctcgagcccaacacgctctacatctga

SEQ ID NO: 86 - protein, 393 aa, Actinomadura sp. 21G792
VSTSAVPTRKELVARAAELAPVLRSNSAWSEKNRRLHDESVQALADAGLFRMRMPARYGGYECDTRTLVEVAAELGRADGSAAWVASVYWIPGWMTCLFPDEVQDEVFSTPDVRVCGTLSPSAIAEPVDGGVVVTGKWGFISGAHHAEWQEIIAILTPEDGEPYPVMGLVPLSELLVVDDWNTSGLRGTGSVSTVARDLFVPQERVLPLPAVLQGQPASARNAGTPIYRVPLLPVASASSVGAVLGMAYAARDAFHKRLPGRKITYTGYESQRDATITHLQIAEATMKTDEAEFHAYRLADLVDAKAAEGTPWKLEERAQVRADLGAVCRLAKEAVDVLASASGGSSIYEDVPIQRILRDVQAVNQHALMNPNTNTELYGRVLCGLEPNTLYI

SEQ ID NO: 87 - DNA, 447 bp, Actinomadura sp. 21G792
  CDS (1)..(447)
atgaccaagtccgacgccgccgcgccgtccgcatccgacccggcggccgtggccgccctcacccagcgcgtcgtcgccgcctgggcccaccaggacgccgaggggttcgccggggtcttcaccgacgacggcacgatgatcctgccgggcgtgtaccgcaagggccgcgacgagatccgcgcctacatggcggacgcgttcgcgggccagtacaagggcacccaggtcaccggcaagccgctcgacatgaagttcctcgccgcggacacggcgctcctgctcacccagggcggggtgctggccgccggggagtcggaggtctccgacgagcaggccatccgggcgtcgtggctcgcggtgaagcgggacggcgagtggcgcctcaccgcctaccagaacagcccctccgtgcagacgctgcccacgccgggggcctcggcgaaatga

SEQ ID NO: 88 - protein, 148 aa, Actinomadura sp. 21G792
MTKSDAAAPSASDPAAVAALTQRVVAAWAHQDAEGFAGVFTDDGTMILPGVYRKGRDEIRAYMADAFAGQYKGTQVTGKPLDMKFLAADTALLLTQGGVLAAGESEVSDEQAIRASWLAVKRDGEWRLTAYQNSPSVQTLPTPGASAK

SEQ ID NO: 89 - DNA, 1206 bp, Actinomadura sp. 21G792
  CDS (1)..(1206)
atgaacggtggcgggccggcccaccgggccggcccgtccggtccgatgatcaacgttttccagccggcgctgggagacgcggagctggcggcggtcaaggaggtcttcgacagcaactggatcggccgcgggaggcgggccgacgcgttcgagaccgcgttcgcgcgccacatcggggtgggacgcgcgcacgtcacgtcggtcaactcgtgcaccgaggcgaccttcatcgcgatggacctggcgggcgtcgggcccggcgacgaggtcgtcctgccgacggtgagcttcgtcggggtcggcaacgccgtcgcgtcccgcggcgcccgcccggtcttctgcgacgtcgacccgcggacgctcgcccccacggtcgacgccgtcgcgggggcgctgaccgaacgcacccgggcggtggtcgtcctgcactacggcggctacccgggcgacatcgcgcggatcgccgcgctgtgccgcgaccggggcgtcctgctgatcgaggacgcggccatcggcatcgcctcctcggtcgacgggcgcgcctgcggcacgttcggcgacttcggggtgtggagcttcgaccacggcaagatcgccgtcgcggtcgacggggggatgctgtacgtccgcgaccccgagctggcggcgcgcgcgcccaagctcgcctacctcggcctggagcagaagagcggcttcgaccaggccctccaccgcgacacccggtggtgggagttcgaggtgtccgacttcgcccggcgctcggtcaccaacgacgtgctcgccgccgtcgggaacgtccagctgggacggctccccgggttcatcgaccgcaggcgggaggtcgcgcggcgctacgacgcgggcctcgccggcgtggccgggctggaccgtccgccgccgctgccgccggggcacgagtcgtcctactacatgtactgggtgcagttcgagggagggatcagggaccagatcgcccgcgacctgtacgaccggggcatctacaccaccttccgctacccgccgctccacctggtcaaggcgtacggctcggacgcggtgctcccggacgcggaggcggcggccgcccgcaccctgttgctgcccatgcaccagtcgctcaccgacacggacgtggagcgggtcgtcgacgccgtgcgcacgtgcgtccccgcacgtctgcgggaacgcgaccgcgcggtgacatga

SEQ ID NO: 90 - protein, 401 aa, Actinomadura sp. 21G792
MNGGGPAHRAGPSGPMINVFQPALGDAELAAVKEVFDSNWIGRGRRADAFETAFARHIGVGRAHVTSVNSCTEATFIAMDLAGVGPGDEVVLPTVSFVGVGNAVASRGARPVFCDVDPRTLAPTVDAVAGALTERTRAVVVLHYGGYPGDIARIAALCRDRGVLLIEDAAIGIASSVDGRACGTFGDFGVWSFDHGKIAVAVDGGMLYVRDPELAARAPKLAYLGLEQKSGFDQALHRDTRWWEFEVSDFARRSVTNDVLAAVGNVQLGRLPGFIDRRREVARRYDAGLAGVAGLDRPPPLPPGHESSYYMYWVQFEGGIRDQIARDLYDRGIYTTFRYPPLHLVKAYGSDAVLPDAEAAAARTLLLPMHQSLTDTDVERVVDAVRTCVPARLRERDRAVT

SEQ ID NO: 91 - DNA, 1344 bp, Actinomadura sp. 21G792
  CDS (1)..(1344)
gtgccggacaaccagccggacccggggaccgtcgcggtcgtcgggctcgggtacgtggggtcgtgcctcgcggcggccctggccgagcgcggcctgaacgtcctcgggatcgacaccgacgagcagctcatcgacgagtacaacgcgggcttctgcaggttccgcgaggacatgctggcggacggcatcgcccgcgcgctggcggcgggcaggctgcacctgaccaccgaccaccgggccgtgtcccgggccggcgtggtgctgatcgccgtcggcacgcccgtccacgccgacgggtcgctggccgacgggcagctccgcgccgcctgcggggcgctcggcgagcacctgcgccccggccagctcgcggtgctcaagagcaccgtcccgccgggcaccacccgggagctggtgcggccgctgctggagcagggcggcctgcgggcgggccgggacttccggctggccttcagcccggaacggctcgcggaggggacggcgctcaccgaactgcgctcgttccccatcgtggtcggcgggatcgacgcgcgcagcaccgcggaggcggcggagttctggcggcggggcctgggcgtggcgacggtcccgcaggagtcgctggaggccgcggagctggtcaagctcgccgacaactggtggatcgacctgaacatcgccctcgccaacgagctggccaggctgtgcgcgctgtacggcgcggacgtcctggacgtgatcgaggcggccaacaccgtccccaagggcaacggccacgtcaacatcctgctgcccggcgtcggggtcggggggtcgtgcctgaccaaggacccgtggatggtgtggcacgcggcccgcctgcgcgggctggagctgcacacgccccgtgccggccgcgcggccaactcggcgatgccggagtacaccgcgcagctgatcatcgacgacctgctcgagtgcggcaaggaccccgccaagtccacggtcgcggtgctggggctggcgttcaagaacgacaccggggacctgcgcgccaccccgacccagggcgtcatcgcggccctgacgaaggccggggtgcgggtgcgctgccacgatccgctggtcgacgccgacgcggccgaggacctgctgaacgtccggccgctgcccacggtggaggagaccgtccgggacgccgactgcctggcggtcctggcccaccaccgcgcgttcgacgcgatcgagtacgccgcgctggagccggccgggtcgtgcctgatcctggacggccgcgaccacttcccgaaggacaaggtcgcgaagctccgcgagctcggctaccgctaccgcggaatcgggaggtga

SEQ ID NO: 92 - protein, 447 aa, Actinomadura sp. 21G792
VPDNQPDPGTVAVVGLGYVGSCLAAALAERGLNVLGIDTDEQLIDEYNAGFCRFREDMLADGIARALAAGRLHLTTDHRAVSRAGVVLIAVGTPVHADGSLADGQLRAACGALGEHLRPGQLAVLKSTVPPGTTRELVRPLLEQGGLRAGRDFRLAFSPERLAEGTALTELRSFPIVVGGIDARSTAEAAEFWRRGLGVATVPQESLEAAELVKLADNWWIDLNIALANELARLCALYGADVLDVIEAANTVPKGNGHVNILLPGVGVGGSCLTKDPWMVWHAARLRGLELHTPRAGRAANSAMPEYTAQLIIDDLLECGKDPAKSTVAVLGLAFKNDTGDLRATPTQGVIAALTKAGVRVRCHDPLVDADAAEDLLNVRPLPTVEETVRDADCLAVLAHHRAFDAIEYAALEPAGSCLILDGRDHFPKDKVAKLRELGYRYRGIGR

SEQ ID NO: 93 - DNA, 987 bp, Actinomadura sp. 21G792
  CDS (1)..(987)
atggaacgcgcgctcgtcacgggcggttcggggttcatcggcgcgcacctggtcgaccggctggtcgcccggggcgacgaggtgaccgtcttcgacgcggtgccgtccagggacggccgcggctcgccccgggagcacgcccgccacgtcaccggggacgtccgcgccgccgacgcgctggccgaggtgatcaagcccggggtcgacgtcgtctaccacctggccgccatcgtcggcgtcgaccggtacctcacccggccgctggacgtcatcgacatcaacgtgctcggcacccgcaacgtgctggagctggcggcccgcgccggcgcccgggtgctggtcgccagcaccagcgaggtcttcggcaagaacccggcggtgccgtggggggaggacggcgaccgggtgctcggcccgaccacggccgaccggtggacctactcgtccagcaaggcgctcgccgagcacatgacgttcgcgttcgggcgccagcacgggctggagtcccgggtggtgcgcttcttcaacgtgtacgggccccggcagcgtccggcctacatcgtcagccgcagcgtgcaccgcgcgctcaacggcgtcccgcccgtcgtgtacgaccggggcgggcagacgcgctgcttcacctacgtggacgacgcggtggagggggcgctgctggccgccgggaatccggcggcggccgggtacgcgttcaacatcggcaccacggacgagacgacggtcgccgaggtcgtcgcgctggtcaacaagctcgccggggtcgaggccacgcccttgcaggtggacacggccgagaagctcgggcccgtctacgaggacctgccgcgccgggtgcccgacaccgtccgggccgccggcctgctcggctggcgtcccggcaccgggctggaggacggcctgaccaggacgatcgagtgggcgcgggcgaacccgtggtggctgagcctgccggaccagggcgccacctga

SEQ ID NO: 94 - protein, 328 aa, Actinomadura sp. 21G792
MERALVTGGSGFIGAHLVDRLVARGDEVTVFDAVPSRDGRGSPREHARHVTGDVRAADALAEVIKPGVDVVYHLAAIVGVDRYLTRPLDVIDINVLGTRNVLELAARAGARVLVASTSEVFGKNPAVPWGEDGDRVLGPTTADRWTYSSSKALAEHMTFAFGRQHGLESRVVRFFNVYGPRQRPAYIVSRSVHRALNGVPPVVYDRGGQTRCFTYVDDAVEGALLAAGNPAAAGYAFNIGTTDETTVAEVVALVNKLAGVEATPLQVDTAEKLGPVYEDLPRRVPDTVRAAGLLGWRPGTGLEDGLTRTIEWARANPWWLSLPDQGAT

SEQ ID NO: 95 - DNA, 1620 bp, Actinomadura sp. 21G792
  CDS (1)..(1620)
atgaccgagagcccacgaccgccgtccgcggagcccggtgcggagcccggcggggagcccggtgcgccgcggcgccggacgcgtcccctcaccggggacgagtacctggagtcgctgcgcgacgggcgggagatccacctgtacggcgaccgcgtcaaggacgtcacgacccatccggcgttccgcaacccgagccggatgacggcgcggctgtacgacgcgctccacgatcccgcgcggcgggacgagctgaccgtcccgaccgacaccggctccgacggccgcacccatccgttcttcaccaccccgcgcgactccggcgacctggtcgcggcgcagcgggccatcgcggggtgggcgcggatgagctacggctggatgggccgcagccccgactacaaggggtcgttcctcggcacgctgggcgcgaacgccgagttctacgagccgttctccgacaacgcccgccgctggtacgccgaggcccaggagaaggtgctgtactggaaccacgcgatcgtccatccgccggtcgaccggaaccgcccgcccgacgaggtcgcggacgtgttcgtccacgtggagcgggagaccgacgccgggctggtggtcagcggggcgaaggtcgtggccaccgcctccgcgctgacccaccacaccttcctggcgcactacgggctgccggtacgcaagcgggagttcgcgctcatcgcgacggtgccgatggacgcgccggggctgaagctgatctgccggccgtcctactcggccgcggcggcggtcatgggctcgccgttcgactacccgctctcctcgcggctggacgagaacgacaccatcctcgtcctggacaaggtcctcatcccctgggagaacgtcttcgtctacggcgacctgggcaaggtgcagatgttcacggcgcggtcggggttcccggagcgcttcaccttccacggctgcacccggctggccgtgaagctggacttcctggcggggctgctgacgaaggcggtggagctgaccgggacggccgggttccgcggcgtccagacccgcctgggcgaggtgctggcctggcggaacctgttctgggggctgtcggacgccgccgcccgcacgcccgtcccctggaaggacggctccgtgctcccgaaccccgactacggcatggcgtaccggtggttcatgcagctcggctatccgcggatcagggagatcgcgctccaggacgtcgccagcgggctgatctacgtcaactccagcgccgaggacttcgccgaccccgaggtccggccgtacctcgacaagtacctgcgcgggtcggggggcgcggactcggtggagcgcgtcaagctgatgaagctgctctgggacgcggtgggctcggagttcggcggacggcacgagctgtacgagcgcaactacgcggggaaccacgagaacacccgggtggagctgctggcggcccagaccgtcggggggcagctggacgcctacaaggcgttcgtcgacgagtgcctggccgagtacgacctggacggctggcgggtgccggacctggactcgttccccggcctccgcggcctgcgcgaccgtctcgccgaaggcggcggagcctga

SEQ ID NO: 96 - protein, 539 aa, Actinomadura sp. 21G792
MTESPRPPSAEPGAEPGGEPGAPRRRTRPLTGDEYLESLRDGREIHLYGDRVKDVTTHPAFRNPSRMTARLYDALHDPARRDELTVPTDTGSDGRTHPFFTTPRDSGDLVAAQRAIAGWARMSYGWMGRSPDYKGSFLGTLGANAEFYEPFSDNARRWYAEAQEKVLYWNHAIVHPPVDRNRPPDEVADVFVHVERETDAGLVVSGAKVVATASALTHHTFLAHYGLPVRKREFALIATVPMDAPGLKLICRPSYSAAAAVMGSPFDYPLSSRLDENDTILVLDKVLIPWENVFVYGDLGKVQMFTARSGFPERFTFHGCTRLAVKLDFLAGLLTKAVELTGTAGFRGVQTRLGEVLAWRNLFWGLSDAAARTPVPWKDGSVLPNPDYGMAYRWFMQLGYPRIREIALQDVASGLIYVNSSAEDFADPEVRPYLDKYLRGSGGADSVERVKLMKLLWDAVGSEFGGRHELYERNYAGNHENTRVELLAAQTVGGQLDAYKAFVDECLAEYDLDGWRVPDLDSFPGLRGLRDRLAEGGGA

SEQ ID NO: 97 - DNA, 1221 bp, Actinomadura sp. 21G792
  CDS (1)..(1221)
atgagcgacgaatgcaagatttgcgggggcgcggtccggcaggtcctggacctcggccggcagccgagagccaatgccttcatcccgcccgaagaggccgaacgcgaattcaccttccggctcgcactggacatgtgcgacgcctgcacgatggtgcagctgcacgaagtggtcccgcaggaaatgcgctaccacggctcgtaccggtaccacgcgtcgggctcggccgggcaccgcaagcatttcgagggggtcgcgcgggacctgctgcgcacggaactggccggcgcggacccgttcatcgtcgagatcggctgcaacgacggggtcatgctctcgacggtcgccgagtccggcgtccggcatctcggcgtcgacccgtccgcgaacgtcaccgcgctggcggcggagcgcggcgtgcgggtgcgcaccgccttcttcgacgagggactggccgaggagatccgcgcggccgacggtccggccgacgtcctctacggcgcgaacaccgtctgccacatcgcgcacctggagtcgctcttccgcggcgcggtgcggctgctgaagccggacgggatcttcgtgttcgaggagccctacctcgggacgatcctcgaccggacggcgttcgaccagatctacgacgagcactgctactacttcacggcgaggtccgtccaggcggcggcggagctgttcgggctggagctggtcgacgtcgcccccactcccctgcacggcggcgagatccgctacacgctgagcccggccggggcacgccgcccgtcccccgccgtgcagcggatgctggacgccgaggccgtccgccggctcgccgaccccgcgacgctgacgcagttcgcccacaccatcgccggggtgcgcgacgacctgctcgggctgctgcgggagatcaccgccgccgggcacaccgtcgcgggctacggggcgcccggcaaggccgccaccgcgaccgccttcttcggcatcgggccggagctggtgccgttcgtgagcgactccacccccgccaagcaggggctcctcgtccccggatcgcacatcccggtccggccgcccgaggagttcaggcgggcccgccccgattacgcgctgctgttcgcgtggaaccacgccgacgagatcatggcgaaggagcgcgagttccggaacgccggcggccggtggatccgctacgtgccggacgtccacgtcgtgtaa

SEQ ID NO: 98 - protein, 406 aa, Actinomadura sp. 21G792
MSDECKICGGAVRQVLDLGRQPRANAFIPPEEAEREFTFRLALDMCDACTMVQLHEVVPQEMRYHGSYRYHASGSAGHRKHFEGVARDLLRTELAGADPFIVEIGCNDGVMLSTVAESGVRHLGVDPSANVTALAAERGVRVRTAFFDEGLAEEIRAADGPADVLYGANTVCHIAHLESLFRGAVRLLKPDGIFVFEEPYLGTILDRTAFDQIYDEHCYYFTARSVQAAAELFGLELVDVAPTPLHGGEIRYTLSPAGARRPSPAVQRMLDAEAVRRLADPATLTQFAHTIAGVRDDLLGLLREITAAGHTVAGYGAPGKAATATAFFGIGPELVPFVSDSTPAKQGLLVPGSHIPVRPPEEFRRARPDYALLFAWNHADEIMAKEREFRNAGGRWIRYVPDVHVV

SEQ ID NO: 99 - DNA, 1023 bp, Actinomadura sp. 21G792
  CDS (1)..(1023)
atgaaggcggccgtgatccccaagcccgacgcgacgtgggaactccgcgaggtcgagaccccgcgtcccgggcccggggaggtgctgatcagggtgcgtgcgtgcggcgtgtgccacaacgacgtgctggccacccgcggggcgatcccgttcccctcgatcagtcccgcgatcaccgggcacgagccggcgggggaggtcgtcgagctcggctcgggcgtcgtccggcgccgggtgggcgaccgggtcggcaccacctgggtgcgggccgggtgcggcacgtgcgcctactgccgccgcgaccttccggtgacggggcagacggcgatgaactgcccgaacccggtcacgacggggttcaccgtgcagggcggccacgccgagtacatggcggtgcgggaggaggagacggtcctcctgccggacgagctgccgttcgagctcgccgcgcccgtgctgtgcgccgggtacaccgcctggtccgcgctgcggacggccgagcccgcgccgcacgagcgggtggcggtgctgggcatcggcggcctgggccacctggccctccagttctcccgggcctgcgggttcgagaccatcgcgatcacctcgtcgccggacaagtacgacctggcccgcgagctgggcgcggacatcgtcgtgcgcgacggcgcgcagctgtgcgcggcgggcggcgccgacgtcgtcatcgcgaccgtcccgtcccatccggccgcggcggcgggcctccaggggctgcgggccggggggcggatggtgctggccgggatcgacgcggccgagccgttcaccattcccccggcgatgacgttcccgttcttcgcgcaggggcagcgcatcatgggcgccacccacggcggccccgtcctgctccgggaggccctcgacctggtcgccgagcggaaggtgaccccgatggtggagacgttccccaaggagcaggtggccgaggcggttgagaagaccgccaagggggaactccggttccgcgccgtcgtgacctactga

SEQ ID NO: 100 - protein, 340 aa, Actinomadura sp. 21G792
MKAAVIPKPDATWELREVETPRPGPGEVLIRVRACGVCHNDVLATRGAIPFPSISPAITGHEPAGEVVELGSGVVRRRVGDRVGTTWVRAGCGTCAYCRRDLPVTGQTAMNCPNPVTTGFTVQGGHAEYMAVREEETVLLPDELPFELAAPVLCAGYTAWSALRTAEPAPHERVAVLGIGGLGHLALQFSRACGFETIAITSSPDKYDLARELGADIVVRDGAQLCAAGGADVVIATVPSHPAAAAGLQGLRAGGRMVLAGIDAAEPFTIPPAMTFPFFAQGQRIMGATHGGPVLLREALDLVAERKVTPMVETFPKEQVAEAVEKTAKGELRFRAVVTY

SEQ ID NO: 101 - DNA, 1383 bp, Actinomadura sp. 21G792
  CDS (1)..(1383)
atgagtgaactcggaaagcgggccgtggttctgggcggcagcatggcgggcacgctcgccgcgcgggtcctttcggaattctacggcgaggtcctggtcgtcgaacgtgacgcggtgctcggtgtccggacgccgaggcggggggcaccgcacaccgtccacgcgcacggcctgcacgcgcgcggccacctgatcgtggaggagctgttccccggcctcaccgacgagctgcgcgcggacggggtgccgaccggggacatcgcggggatgcgctggtacttcaacgcccggcggatcatgccggccgacaccgggctggtgtcgctgacggccccgcgccccgtcctggaggcgcacgtccgggcgcggacggccgcgctgcccggggtcacctacctggagcggcactcgatcatcgggctgctcaccaccgcggaccgcacccgggtcaccggggtccgggtggagcggcgggacgagcccggggagatcgagctggaggccgacgtggtcgtggacgccaccgggcggggctcccggacccccgcctggctggaggagctcggctaccggcggccggaggaggagcgcgtcaaggtcggcctggcgtacacgacgcggcactaccggacgcggccggagtggttcgacggcgtccagtcgatcaacccggtggcgtccccggcccatccgcggggcgcgttcttcggccaggtcgggccggacacctgcatcctgtcgctcaccgggatcctcggcgaccatccgccgaccgatccggaggcgttcctggagttcgcgcggaccctccccgtcccggacgtctacgaggcggtccgcgacggcgaggccctcgacgacccggtcagcttccgcttcccggcgagcgtccggcgccggtacgagcggctcgaccggttccccgaccggctgctcgtgctgggcgacgccgtgtgcagcttcaaccccgtctacgggcagggcatgagcgtcgcggcgatcgaggccatggagctgcgccggcacctgcggcagggggcgccccgccccgccgagtacctcaccgcggtcgcccgcgcggtcgacgccccgtgggaggtgtccgcgggcggtgacctcgacttcccgggggtggagggccgccgcacgctgaaggtccgcgccggcaacgcctacatggcgcgcctccagtacgcggcgacgaaggacccgaaggtcaccgaggggttcatgcgcgtggccgggctcatggaccctcccaccgcgctcatgcgccccggcatggccgcccgcgtcctgcgccacgcgatccgcaggccggctccgggccggtcctggctggacggccggtccccggcggccgacccggcccgctcctcctga

SEQ ID NO: 102 - protein, 460 aa, Actinomadura sp. 21G792
MSELGKRAVVLGGSMAGTLAARVLSEFYGEVLVVERDAVLGVRTPRRGAPHTVHAHGLHARGHLIVEELFPGLTDELRADGVPTGDIAGMRWYFNARRIMPADTGLVSLTAPRPVLEAHVRARTAALPGVTYLERHSIIGLLTTADRTRVTGVRVERRDEPGEIELEADVVVDATGRGSRTPAWLEELGYRRPEEERVKVGLAYTTRHYRTRPEWFDGVQSINPVASPAHPRGAFFGQVGPDTCILSLTGILGDHPPTDPEAFLEFARTLPVPDVYEAVRDGEALDDPVSFRFPASVRRRYERLDRFPDRLLVLGDAVCSFNPVYGQGMSVAAIEAMELRRHLRQGAPRPAEYLTAVARAVDAPWEVSAGGDLDFPGVEGRRTLKVRAGNAYMARLQYAATKDPKVTEGFMRVAGLMDPPTALMRPGMAARVLRHAIRRPAPGRSWLDGRSPAADPARSS

SEQ ID NO: 103 - DNA, 1044 bp, Actinomadura sp. 21G792
  CDS (1)..(1044)
gtgaacgccatgaaagctctggtgctggcggggggcaccgcctcccggctccgccccttcagcaattcgcttcccaagcagctcatcccgctcgccggacgcccggtcctggaacacgtcctgcgcggcatcgccgacatcggcgtccgggacaccgccatcgtggtgggcgacaccgccccggccgtcatggacgcgatcggcgacggcgcccgcctcgggctccgggtgacctacgtcccgcaggcccggccgctgggcctggcgcactgcgtcacgctggcccgccccttcctcggcgacgacgacttcgtcatgtacctcggcgacaacctgctgccgggcggcatcgccggcccggcgcggcgcttccgcgaccggcgccccagcgcgcagctcctgctgcgccgggtcgccgacccgcgcgccttcggggtcgccgaggtcggacgggacggcgtcgtccggcggctcgaggagaagcccgcgcacccgcgcaccgacctcgccgtcctcggcgtctacttcttcacctccgccgtgcacgcggcgatcgacgcctgccgcccgagccgccgcggcgagctggagatcaccgacgcgatccaggtgctgatcgaccggggccgcaccgtccgcgccgtcgagcacaccggccactggcgcgacatcgggcggcccgcggacgtcctggcgtgcaaccgccgcctcctcgccgaactgcggccccgcacggacggcgacctcgacgcggccaccgaggtgaccggcggccccgtcgtcatcgaaccgggcgcccgggtggtccggtcgcggatcaccggcccggccctcgtgggggcggacaccgtcctcaccgactgcgagatcggcccggacgccgccatcggccgcgactgctcgctgcgcggcgtgcggctccgcgacgcggtcgtcctggacggcacgtccctgtccggccccgccgacgtccgcgccgccctcgtcagtccggtcgccgcgcacagcgtgatcgacccggccgcgtccggcgcccccggctga

SEQ ID NO: 104 - protein, 347 aa, Actinomadura sp. 21G792
VNAMKALVLAGGTASRLRPFSNSLPKQLIPLAGRPVLEHVLRGIADIGVRDTAIVVGDTAPAVMDAIGDGARLGLRVTYVPQARPLGLAHCVTLARPFLGDDDFVMYLGDNLLPGGIAGPARRFRDRRPSAQLLLRRVADPRAFGVAEVGRDGVVRRLEEKPAHPRTDLAVLGVYFFTSAVHAAIDACRPSRRGELEITDAIQVLIDRGRTVRAVEHTGHWRDIGRPADVLACNRRLLAELRPRTDGDLDAATEVTGGPVVIEPGARVVRSRITGPALVGADTVLTDCEIGPDAAIGRDCSLRGVRLRDAVVLDGTSLSGPADVRAALVSPVAAHSVIDPAASGAPG

SEQ ID NO: 105 - DNA, 417 bp, Actinomadura sp. 21G792
  CDS (1)..(417)
atgaattggacgctcgaggtcgtctgccttccggtcaccgacctggaccgctctctcgccttctactccgaggggctcggcttcaacgtcgacatcgacaccgtgcgccccgacgggaagcgcatgatccaggtgaccccgcccgggtccggctgctccgtcatgctgggcgccgacatgaacgacatgccgccggggtcgatgcgcggcctgcagctcgtcgtccgcgacatcctcgccgcccacgccgagctcaccgagcgcggcgtgaaggtcggcgaggtgcaggtcttcacgcaggacggcagcatgcgcgcctaccaggacggcgactggctcgacaacaccggcttcctcttcttcgacgacccggacggcaacagctgggccgtccagcagatcagcgcccgggactga

SEQ ID NO: 106 - protein, 138 aa, Actinomadura sp. 21G792
MNWTLEVVCLPVTDLDRSLAFYSEGLGFNVDIDTVRPDGKRMIQVTPPGSGCSVMLGADMNDMPPGSMRGLQLVVRDILAAHAELTERGVKVGEVQVFTQDGSMRAYQDGDWLDNTGFLFFDDPDGNSWAVQQISARD

SEQ ID NO: 107 - DNA, 1674 bp, Actinomadura sp. 21G792
  CDS (1)..(1674)
gtgagcacctccgacctcgatttcgtcccggtcgcggtaccgcggcccggcaccggcccggcggcggcgccgtccgcgccgccgccgggcccgcccgcgccgcccacctcggcaccgccgcccgcgcgctcgatgcgggacctgcgcgccggccgggacgagctgcgggcgcgggcggccgagggacgggccgaggggatcgagcggcagcacgggctcggcaagcggaccgcgcgggaacggctggagctgctcctcgacgagggctccttcatcgaggtcgagatgttccggcggcaccaggcgcacgggctgaagatcggcgcgaaccgcccgtacaccgacggggtggtcgtcggatccggcacggtccacggccgccgcgtgttcgtctacgcccaggacttcaccgtgttcggcggctcgctgggcgccgcgcacgcgtcgaagatccacaaggtgatggacctggcgatcgcgaacggggccccgctgatcgggctgaacgacagcgggggcgcgcggatccaggagggggtgcaggccctcgacggctacggcgggatcttccgccgcagcgtccaggcgtccggcgtgatcccgcagatcagcgtggtgctcgggccgtgcgccgggggagcggcctactccccggcgctgagcgacttcacgttcatggtgcgcgacaccgcccagctgtacctgacgggcccggacgtggtcgaggcggtgagcggcaagcgggtcacgcacgccgagctcggcggggcggacgtgcacggggaccggaccggggtggccacgttcgtctacgacgacgaggagacctgcctggaggaggtgcgcttcctgctctccctgctgccggacaacaacctggagccgccgcccgccgcgcccccgcgcggggcggccgacgacgagcggccggagctggcggagatcgtcccggtcgagcccagcaagccctacgacatgcggctcgtcatcgccgagctggccgacgacggcgagttcatggagctgcacgagcgctgggcggcgaacgtgatctgcgccctcacgcggatcgacggcgaggtcgcgggcgtggtcgcgaaccagccgatggtgctggcgggcgtgctggacgccgacgcggcgcagaaggccgcgcggttcgtccggttctgcgacgcgttccggatccctctggtcacgctggtggacgtgcccgggttcctgcccggcctggagcaggagcacgcggggatcatccggcacggtgccaagctgctgtacgcctactgcgaggccacggtgccgcgcgtccaggtcatcctgcgcaaggcgtacggcggggcgtacatcgtcatggactcgaggtccatcgggtgcgacctctcgctcgcctggccgacgaacgagatcgcggtgatgggcgccgagggcgccgtgaacgtgctgttccgccgggagctggcggcggcggccgatcccgccgccctgcgcgccgaactgatcgaggagtacaccgggcagctcgtccatccgtactacgccgccgagcgcggtctggtcgacgacgtcatcgacccggtccggacccgtgccgtcgtcgccggggggctgcggatgctgcggaacaagcgggtccggaccccgcagcgcgtccacgggaacgtgccactgtga

SEQ ID NO: 108 - protein, 557 aa, Actinomadura sp. 21G792
VSTSDLDFVPVAVPRPGTGPAAAPSAPPPGPPAPPTSAPPPARSMRDLRAGRDELRARAAEGRAEGIERQHGLGKRTARERLELLLDEGSFIEVEMFRRHQAHGLKIGANRPYTDGVVVGSGTVHGRRVFVYAQDFTVFGGSLGAAHASKIHKVMDLAIANGAPLIGLNDSGGARIQEGVQALDGYGGIFRRSVQASGVIPQISVVLGPCAGGAAYSPALSDFTFMVRDTAQLYLTGPDVVEAVSGKRVTHAELGGADVHGDRTGVATFVYDDEETCLEEVRFLLSLLPDNNLEPPPAAPPRGAADDERPELAEIVPVEPSKPYDMRLVIAELADDGEFMELHERWAANVICALTRIDGEVAGVVANQPMVLAGVLDADAAQKAARFVRFCDAFRIPLVTLVDVPGFLPGLEQEHAGIIRHGAKLLYAYCEATVPRVQVILRKAYGGAYIVMDSRSIGCDLSLAWPTNEIAVMGAEGAVNVLFRRELAAAADPAALRAELIEEYTGQLVHPYYAAERGLVDDVIDPVRTRAVVAGGLRMLRNKRVRTPQRVHGNVPL

SEQ ID NO: 109 - DNA, 693 bp, Actinomadura sp. 21G792
  CDS (1)..(693)
atgagtccacgccgacctgatccacgggcccgcaccgtcctgatcgacgtcgccgcgcgcctgctcgccgagaagggcccgcaggcgctgaccacgcgccgcatcgccgccgaggcgggcacctcgacgatgggcgtctacacgcacttcggatcgatgggggagctggtccgggagatggtgcgcgagggtttcgcgcggctgcacacccggttcacccaggtgcgcgacagcgacgatcccgtcgccgacctggcgctgctgggccgcgcctaccggcacaacgccctggccaacccgcacctgtacgcggtgatgttcggcggcgcctcgctcggcggcttctccctgaccgacgaggaccgccagcacggccgctacaccctggtgtacgtgacggcctgcgccgggcgctgcgtcgaggcgggacggttccgccccggcgatcccgagctggtcgcccaccggatgtggagcgcgatccacggcctggtcacgctggagctgggcggctacctcgtcgagccctacggcgccgacacgtgcttcgagtcccagctcgtcaccctgatgatcggggcgggcgacaccgagaccgccgccacggcgtccgtcaccggctccgcggcgcgcttcgacccggagaccggcctggagacgggcctggagacggggcgggccccggtcacctga

SEQ ID NO: 110 - protein, 230 aa, Actinomadura sp. 21G792
MSPRRPDPRARTVLIDVAARLLAEKGPQALTTRRIAAEAGTSTMGVYTHFGSMGELVREMVREGFARLHTRFTQVRDSDDPVADLALLGRAYRHNALANPHLYAVMFGGASLGGFSLTDEDRQHGRYTLVYVTACAGRCVEAGRFRPGDPELVAHRMWSAIHGLVTLELGGYLVEPYGADTCFESQLVTLMIGAGDTETAATASVTGSAARFDPETGLETGLETGRAPVT

SEQ ID NO: 111 - DNA, 1212 bp, Actinomadura sp. 21G792
  CDS (1)..(1212)
gtgatggccgccgagacgcagggaaccgatccgcggacggcgccggccgccgcgcccgcccaccgcgcggacgctccgctccccgtggcgggcgggctccccccgggcctgcgcgcctgcttcctccaggccgagacgcacccgctggcgcccggcgcgggcggcgagatcctcgccgggccgcacctgctctccggcatcgtgctcgacggcgggaccgcgcggtggctccgctgcgcgccgcccgtcgggcggaaccggccgctcggccccgtcccggcgctcgcgcccgtcctgtggacgggcgcgcgggaggcggatccggacgggccggggacggtcgcgttcgcgcgtccggtccgggacccggcgagcggccggtggcacaccgtcgcgacctatccgggcctcgggcacgccgaacacctggtcaccgcgccggacggcaccgtcgtccacgccgagccgttcccgctcgacggcgctccgctcgtccacgccgtcggcctcaccgcccggtacctcgtcgtgttcgacctgcccgtggcccactcgcgcgccgccgcgctggtcggggagcggccgccgtacgcgtggcgggagggccggcccgcgcgggtggggttcctgccccgcgccggaggggcgcccgtgacctgggtccccgtcgacccctgctacgtcttcgacgtggtcgacgcccgcgacgacggaccgcacgtcgtgctggacgtcgtcgcggcgcggcgcgcgttcgacggagcgggcgcgtccccgtcccggctgcggcggtggcgcttcgaccccgccgccgggacggccgcgaccctccgcacgtccgccccggtcaccggcgcggtcgccgtcccggccgcggaaccgggcgcgcaccgcctggtcgcgaccgagcccggtgggacggtcgtcctgcacgacccggcccacggcacgtccgcccgcacgtcgctcggccgggggtggcggcccggcgcgcccgtcttcgcgcccggcccggagaccgggggctggatcctcgccgtggcgcggcacgccgcgtccggacgctgcgagctgcgcgtcctcgacacctccggccgtccggtggcggcggtgcggctgcccgtgcggctcgcggccggccgggccgtccggtcggccgccgtccccgacgccggcgccctcgccggcttcgccgcccgcgccgccacctga

SEQ ID NO: 112 - protein, 403 aa, Actinomadura sp. 21G792
VMAAETQGTDPRTAPAAAPAHRADAPLPVAGGLPPGLRACFLQAETHPLAPGAGGEILAGPHLLSGIVLDGGTARWLRCAPPVGRNRPLGPVPALAPVLWTGAREADPDGPGTVAFARPVRDPASGRWHTVATYPGLGHAEHLVTAPDGTVVHAEPFPLDGAPLVHAVGLTARYLVVFDLPVAHSRAAALVGERPPYAWREGRPARVGFLPRAGGAPVTWVPVDPCYVFDVVDARDDGPHVVLDVVAARRAFDGAGASPSRLRRWRFDPAAGTAATLRTSAPVTGAVAVPAAEPGAHRLVATEPGGTVVLHDPAHGTSARTSLGRGWRPGAPVFAPGPETGGWILAVARHAASGRCELRVLDTSGRPVAAVRLPVRLAAGRAVRSAAVPDAGALAGFAARAAT

SEQ ID NO: 113 - DNA, 1335 bp, Actinomadura sp. 21G792
  CDS (1)..(1335)
atgacgcaggacaccggcatatggcttgaaggacacctcgcccccgtcccggacgagatcgacgcgctcgaccttcccgtcaccggcacgctcccgcccgagctgaccgggcgctacttccgcaacggccccaacccgcggccgggacggccgagcacccactggttcaccggcgccgggatgatccacggcgtgcggctccgcgcgggccgggccgagtggtaccgcaaccgctgggtccggacccgggagctcaccgaggacgccccgttcctgcgggacgacgggacgctcgacctcaccgcggtgcccgccaacacccacgtcgtccggcacgcggggaagatcctcgcgctcgtcgaggccggcctcccgcacgcgctgacgcccgagctcgggacggtcggcctcgaggacttcggcgggcgcctcaccaccgcgatgaccgcgcacccgaagcgggatccggtgacgggcgagctgctgttcttcggctacggcgtcttcccgccccacctgacctaccaccggctctcggcggacggacggctcgtggagagccgcgagatcgacgtccccgccgggacgatgacgcacgacttcgcgatcaccgagaaccacgtcgtctggctcgacctgcccgtcgtcttcgacctcgacctggcgatgaaggagacgtccatgccgttccgctgggacgacgcgtacggggcgcggctcggcgtcatgccccgggagggcggcggggacgtccgctggttcgacatcgacccgtgctacgtgttccacgtcgggaacgcccacgaggacggggcgggccgcatcgtcctcgacgccgtgcgctacgcccccgacgagttcaccgccctgtgggcgatgatcggcgggtcggccgaccccgcccgggaggccggcctcctggaggaggcccgcctgcaccgctggacgctcgaccccgcgaccggacgcgcggccgaggagccgctggacgaccggggcgtggagttccccacccacgacgacgaccggacgggcctgccgaaccggttcctctacaccgtgtccgggaacgcgatcgtgaagtacgacgtgcgcgacgggtcctcctccgcgcgcgagttcgaggagggcgcgagcgtcggcgaggccgtcttcgtcccggccgagggggcgcgtgcggaggacgagggctggctgctgtcgatcgtctccggcccgtccggcgcggacctcgtggtcatggacgcgacggacgtctcccggaccaccgcgtccgtccggctgccccggcgcgtcccggccggtttccacggaagctggatccccgactcctga

SEQ ID NO: 114 - protein, 444 aa, Actinomadura sp. 21G792
MTQDTGIWLEGHLAPVPDEIDALDLPVTGTLPPELTGRYFRNGPNPRPGRPSTHWFTGAGMIHGVRLRAGRAEWYRNRWVRTRELTEDAPFLRDDGTLDLTAVPANTHVVRHAGKILALVEAGLPHALTPELGTVGLEDFGGRLTTAMTAHPKRDPVTGELLFFGYGVFPPHLTYHRLSADGRLVESREIDVPAGTMTHDFAITENHVVWLDLPVVFDLDLAMKETSMPFRWDDAYGARLGVMPREGGGDVRWFDIDPCYVFHVGNAHEDGAGRIVLDAVRYAPDEFTALWAMIGGSADPAREAGLLEEARLHRWTLDPATGRAAEEPLDDRGVEFPTHDDDRTGLPNRFLYTVSGNAIVKYDVRDGSSSAREFEEGASVGEAVFVPAEGARAEDEGWLLSIVSGPSGADLVVMDATDVSRTTASVRLPRRVPAGFHGSWIPDS

SEQ ID NO: 115 - DNA, 834 bp, Actinomadura sp. 21G792
  CDS (1)..(834)
gtgagaaccgccatgttccttgtcaccggagccaccggtaacgtcggccgccacgtggtcggcgagctgctctgcgcgggcgcgaaggtccgcgcgctcagccgcgacccggcgtccgcccggctgcccgccgaggtcgaggtcgcccccaccgccgagatgccgctggacggcgtcacggcgatcttcctcaaccccgcggcgttctggggcggtctcggcgacctgctgccccgcgccgccgagcacggcgtccggcgcgtcgtcatgctgtcgtcggccgccgctttcgaccccgaccccgccaacgagctggccgcccaccacctcgcgttcgagcgggcgatcgaggagtccgggctcgagtggacgttcgcgcgtcccggcgagttcgcgtccaacgcgctgggctggcgggacgcgatccgcgccggacgtccggtgcgcgagccgttcgcggcgggacggacgacgccgatccacgagcgcgacatcgccgccgtcgcggcccgcgccctgctgacggacgcgctggtgggcgcccgtccggagctgagcggccccgaggcgctgacgaacccggacaaggtgcgcgtcatcggcgaggcgatcggccgtccggtgcccttcgaggagatcaccccggaggaggcgcgggaggagatgctggcccggccctacatgcgggagggcctggcggacgtcctgctccgcctgcgcgcggaggcggtgggcgccgaggtcgagccgagcggcgaggtcgagcgcatcaccggacgtccggcgcgcacgttcgcggactgggcggccgaccacgccgacgacttccgctga

SEQ ID NO: 116 - protein, 277 aa, Actinomadura sp. 21G792
VRTAMFLVTGATGNVGRHVVGELLCAGAKVRALSRDPASARLPAEVEVAPTAEMPLDGVTAIFLNPAAFWGGLGDLLPRAAEHGVRRVVMLSSAAAFDPDPANELAAHHLAFERAIEESGLEWTFARPGEFASNALGWRDAIRAGRPVREPFAAGRTTPIHERDIAAVAARALLTDALVGARPELSGPEALTNPDKVRVIGEAIGRPVPFEEITPEEAREEMLARPYMREGLADVLLRLRAEAVGAEVEPSGEVERITGRPARTFADWAADHADDFR

SEQ ID NO: 117 - DNA, 642 bp, Actinomadura sp. 21G792
  CDS (1)..(642)
gtgacggacagcaggccacgggcgcggcgggcgccggacccggacgaacgcaagctcgacgccgagcgcacgcgggcgctcctcctggaggccgcgctggacgagttcgccgcgaaggggtacgcgggcgcccgcgtgcaggacatcgccgaccgcgccggggtcaacaagcagctgatcagctaccacttcggcggcaaggagggcctctactgcgaactcggccgccgctggctggagcgcgaggccgagttcaacgatcccggggtcccgctgcccgacctcgtcgtccggtacctgcgcaacgccctggacgacccgcgcggcagtcggctggaggcgtggcgcggcctcaccgaggaccccggcgacgcggaactcctgccgcccgaggacctgaccgacatggagagccgcaaggccgccggggagatcgccgacgacctcgaccccggctacgtcatggtcgcgctgcaggcgatggtgtcgctgccggtcgcccggccggcggtcgtccggcgcgtcctcggcgtggacccggcgtcgcccgagttccgcgaatgctacgccgagcagctcgcccgcatcgtccggtacctcgcgggcgcgcggccgccggacggcgagccgcccgcccgctga

SEQ ID NO: 118 - protein, 213 aa, Actinomadura sp. 21G792
VTDSRPRARRAPDPDERKLDAERTRALLLEAALDEFAAKGYAGARVQDIADRAGVNKQLISYHFGGKEGLYCELGRRWLEREAEFNDPGVPLPDLVVRYLRNALDDPRGSRLEAWRGLTEDPGDAELLPPEDLTDMESRKAAGEIADDLDPGYVMVALQAMVSLPVARPAVVRRVLGVDPASPEFRECYAEQLARIVRYLAGARPPDGEPPAR

SEQ ID NO: 119 - DNA, 801 bp, Actinomadura sp. 21G792
  CDS (1)..(801)
atgacggagatcgcacccgagacgcggcggggccggggaagggcggcggcggtccggccgagcccggtgttcctcgtgatcgtggcggcgaccgcgctggcggggctggtcacctggcggtacgggcagatcaccgaccagccggcccggatcgcgctgttcgtgttcgtgctggccgggtgggtgctgtcgctgtgcctgcacgagttcgggcacgcctacacggcgttccggtccggggaccacagcgtcgcgaccaagggctacctgacgctcaacccgttcaagtacgccgacatggtgctgagcttcgcgatcccggtgctgttcatcctgctcggcgggatcggcctgccgggcggcgcggtgtggatcgaccggcactcgatccgcgggaagatccggcacagcctgatctcggcggcgggcccgctgtcgaacgtcctgttcgccgtggtgctggccgtcctgatcaacactctcgccgacgacgcccacagcgtgttctgggtcggcgtggcgttcctggcgttcctccaggtgacggccgcgatcctgaacctgctgccgatcccgggcctggacggcttcgggatcgtcgagccgtacctgccgcggagctgggtgcggcacgcgaaccagtacgcgggctacgcgttcctggtgctggtcgcgctgctgtggctcggccccatcaacgagggcttcttcaacctcgtcttctacgtcaccgacgcgatcggcctcgaggagctccagatcgcgatcggccacgcgctgttccagttctggcaggactga

SEQ ID NO: 120 - protein, 266 aa, Actinomadura sp. 21G792
MTEIAPETRRGRGRAAAVRPSPVFLVIVAATALAGLVTWRYGQITDQPARIALFVFVLAGWVLSLCLHEFGHAYTAFRSGDHSVATKGYLTLNPFKYADMVLSFAIPVLFILLGGIGLPGGAVWIDRHSIRGKIRHSLISAAGPLSNVLFAVVLAVLINTLADDAHSVFWVGVAFLAFLQVTAAILNLLPIPGLDGFGIVEPYLPRSWVRHANQYAGYAFLVLVALLWLGPINEGFFNLVFYVTDAIGLEELQIAIGHALFQFWQD

SEQ ID NO: 121 - DNA, 591 bp, Actinomadura sp. 21G792
  CDS (1)..(591)
atgcccccggtcgcctccgacgccacccgtgagcgcatcatcgacgccgccgaagagtgcttcggccggttcggggtggccaagaccaccgtcgaggacatcgccgccgcggcgaagctgtcccgggcgacggtctaccgggccgtcaccgggggacgcgacgaactgatcctcgccgtcgtggtgcgcgatctgctgcgcttcctcgaccggctggccgaccggctccgcgcggagcggtcggtgccggaggcgatcgtcgagggcacgctggacgcggtcgagtacgtccgcggcgcgccgacgatcgcgcacttcctggtgcccgaggcggcggggcacatgcaggcggcggtggcgggggcgggcgagcacgtcctcgacctgtgctgcgagtacgtccggccccacttcgagcacgcgcagcggcggcggacgctcaggccggacatcgaggtggagggcacggtggagttcctcttccggatcatcacctcgctgatcgtgatggaccgcgaccgggacgccgacgggctgcgccgcttcctgcgcacctacgtcgtacccgccatcgcggcggaaggggcatga

SEQ ID NO: 122 - protein, 196 aa, Actinomadura sp. 21G792
MPPVASDATRERIIDAAEECFGRFGVAKTTVEDIAAAAKLSRATVYRAVTGGRDELILAVVVRDLLRFLDRLADRLRAERSVPEAIVEGTLDAVEYVRGAPTIAHFLVPEAAGHMQAAVAGAGEHVLDLCCEYVRPHFEHAQRRRTLRPDIEVEGTVEFLFRIITSLIVMDRDRDADGLRRFLRTYVVPAIAAEGA

SEQ ID NO: 123 - DNA, 330 bp, Actinomadura sp. 21G792
  CDS (1)..(330)
gtgtgccgcatgaacacggacgtcttcgccgcgctggccagcccggcgcggcgcgagctgaccgccctgctgctggacggcccgcgctcggtgaacgacctcgcctcgcacttcgcgatgagccggccgagcgtctccgagcatctgcgggtcctgcgcggcgccgggctcgtcagcgagcggcgcgacggccggcagcgcctctacacgctcgaaccggggccgctgatggaactgtcggaatggctcacaccgtacgagcggttctggcgcgcgaagctgtccgacctgcgaacactgctggacgacgagcaaggggagcccacatga

SEQ ID NO: 124 - protein, 109 aa, Actinomadura sp. 21G792
VCRMNTDVFAALASPARRELTALLLDGPRSVNDLASHFAMSRPSVSEHLRVLRGAGLVSERRDGRQRLYTLEPGPLMELSEWLTPYERFWRAKLSDLRTLLDDEQGEPT

SEQ ID NO: 125 - DNA, 429 bp, Actinomadura sp. 21G792
  CDS (1)..(429)
atgaacgagcacgcgatcgaggtcgacgagttcctgccgcacccgcccgcgcgggtctggcgcgcgctcaccgaccccgacctcctcgcccgctggctgatgccgaacgacttcgagccgtccgtcggccaccgcttcaccttcgccacccgtccggtcccgagtgccgacttcgacgggacggtccactgcgaggtcctcgagatcgacgccgagcggctgctgcgcatcagctgggccggcggcggcctcgacaccaccgtcacctggcggctggcccccgagggcaccggcacccgcctgttcatcgagcaccgaggcttcgacctggacgaccccgcgcagcagttcgcgttcaagggcatgggcagcggctggcgcaccaacgtcctgcgagccctgcaggacagcctcgccgaggtcgcgtga

SEQ ID NO: 126 - protein, 142 aa, Actinomadura sp. 21G792
MNEHAIEVDEFLPHPPARVWRALTDPDLLARWLMPNDFEPSVGHRFTFATRPVPSADFDGTVHCEVLEIDAERLLRISWAGGGLDTTVTWRLAPEGTGTRLFIEHRGFDLDDPAQQFAFKGMGSGWRTNVLRALQDSLAEVA

SEQ ID NO: 127 - DNA, 879 bp, Actinomadura sp. 21G792
  CDS (1)..(879)
atggccgacctggacctccgtctcgtccgctacttcacggccgtcgccgagcaccgccacttcggccgcgccgccgaggccctgcacatcacgcagccgtcccccagccgccaggtgcgcagcctcgaacggcggctgggcgcccgcctgctggaccggacgccccagggcacccggctcaccgaggcgggcgaggtcttcctgccgcacgcccgagccctcctgcgttcggccgcgcaggccaccgcgcagacccgcgccgccgccgaacccgaccggatcacgatcggctacacgagcatcatcgtcaccccggccgtccgcgaactgcgccaccggcacccggacgccgacgtccgcaccgtccacgtcgcctgggacgaaccgtccgccgccctgctcgaccaccgcgtcgacgcggtggtggcctgcctcccgttcccgaccgacgggctgcacgtcaccgtcctctacgacgagccgcgcgtcctggtcgtccccctcgaccaccgcctcgccgggaaggagtcggtcaccctcgacgacatcgccgacgagcccatgccccgggtgtccgacccggacccggcctgggaggcgttctggcgcatcaacccccgccccgacggacgtcccgccccggacggccccctcatggaagccctcgaggacaagttcgagttcgtcgccgcgggcgaggccgtcgccatcatgccccgcccgcgccaccacgccgtccgccccgacctcaccacggtccccatcgagggcatcgacccgagccacgtcgccctcgccacccgcaccggcgaccgcaaccgcctcgtcaccgacttccgcaagatcgcccaagcccatctgaccgcccccgccgggtga

SEQ ID NO: 128 - protein, 292 aa, Actinomadura sp. 21G792
MADLDLRLVRYFTAVAEHRHFGRAAEALHITQPSPSRQVRSLERRLGARLLDRTPQGTRLTEAGEVFLPHARALLRSAAQATAQTRAAAEPDRITIGYTSIIVTPAVRELRHRHPDADVRTVHVAWDEPSAALLDHRVDAVVACLPFPTDGLHVTVLYDEPRVLVVPLDHRLAGKESVTLDDIADEPMPRVSDPDPAWEAFWRINPRPDGRPAPDGPLMEALEDKFEFVAAGEAVAIMPRPRHHAVRPDLTTVPIEGIDPSHVALATRTGDRNRLVTDFRKIAQAHLTAPAG

SEQ ID NO: 129 - DNA, 1014 bp, Actinomadura sp. 21G792
  CDS (1)..(1014)
atgctgatccatatcgatattggacgaactcgaatggtcgatgatcttctagctcgcatgccccgaccctttcggctgcggccggtcgtcgccgctatgaccacctgcgccctgctcggcggcgcggcctgcggaaccgcccccggcgacacccgcgtcgcgacacccgtcgccgacaccgtcgtcgcgtccgacgccggcctgaaaaagacgttggcggaactggagaagtcgtacaacgcgcgtatcggcgcggtgggcatcgacctcggctccggcaagacggtcggttaccgggccgatgaacgcttccccttcaactcgatgttcaaggtgttcgcgtgctccgccgtcctgcacgaagcgcggaccggaagccccggcctgatggacaaggtcatccgctggacgccggacgagatggccgggctgaccgagaactccccggaaaccaccgaatacaccgacaccggcatgacgcccgcgcaattgtgccgcgcggggatcaccaagtccgacggcttcgcgggcaacacgctgctgaagcagatcggcggcccgtccggcctgacggcgttcttccgctccaccggcgaccgggtgagccgcctcgaccgtcccgagccgtacctgacggagtgggagcccggccaggtccgcgacaccaccacccccgcggcgtccgcccgcaccttcgccgaactcaccaccggcaaaaccctccacccccgcgaccgagcgcgcctggtcgactggctgaaggccagcctcaccggatccagccgaatccgggcgggactgccgaaggactggacggtcggcgacaagaccggcaccggcggcgcgaagaaccacggcaccgctggcgacatcgcgatcgtctggccgcccgggacgaaagcgccgatgatcctgtcggtgctcacgaaccgcaacaccgacaacaccccgcacgacgacaaggcgatcgcccgcaccgcgaccgccctggccgaagccctcggccgcctctga

SEQ ID NO: 130 - protein, 337 aa, Actinomadura sp. 21G792
MLIHIDIGRTRMVDDLLARMPRPFRLRPVVAAMTTCALLGGAACGTAPGDTRVATPVADTVVASDAGLKKTLAELEKSYNARIGAVGIDLGSGKTVGYRADERFPFNSMFKVFACSAVLHEARTGSPGLMDKVIRWTPDEMAGLTENSPETTEYTDTGMTPAQLCRAGITKSDGFAGNTLLKQIGGPSGLTAFFRSTGDRVSRLDRPEPYLTEWEPGQVRDTTTPAASARTFAELTTGKTLHPRDRARLVDWLKASLTGSSRIRAGLPKDWTVGDKTGTGGAKNHGTAGDIAIVWPPGTKAPMILSVLTNRNTDNTPHDDKAIARTATALAEALGRL

SEQ ID NO: 131 - DNA, 1059 bp, Actinomadura sp. 21G792
  CDS (1)..(1059)
atgagatcactcccggcccgcctggccgtcacggccgtcgcgttcgtggccctggcgcccgtgtccgccgtgcacgccgcgcctccgcccgcgacgctgagagatgtcccgctgccgttcctatggccccgggcgggggtgtacagcgtcgccgccgtctccgacaccgaagcgtggttcgccggagtccagggattcgtcaacgagcccggtggcaacccggtagtgcgtcgccggatgggctcggagtggcgggagtatccgctcaggggctggtccggcagcggcggcatccaagaggtggtcgcgcacggcggcgaggtctgggtgtggggtgtccaggacgggacgcgcctctacctggcgaggttcgacggcaccgcgttccagcccgtcgccccgctttccggggacgtctacgtttacggcacccgcctgtgggccggcccggccggggtgtggctccagatcaaggtggtgggctcggacagcgtgatcaggccagagctgttccgccgcgtcggcgacgcctggacggccgaccctctcgccggtcagttgcagggcgggctgccggacctcaacgcgcgcagcgccaccgaagcatggaccggaagctgccgctacaacgccgacgccggacgcctcgagtcggtggcgctccgctggaacggctccacctgggcggcactgcccccgctgcccaccgagcattgcgtcggcagcgtcgcacccgccgggggcggcgcggtctgggcgctcgcctgggacacgctgtaccactgggacggcacgaggtggacctcggcacccgccggccccttcgacggggagggcgagaaggtgcgcctggacaaggacggcaacccgctcgtggtcgtcggccacacgatcaagttcgcccccgtgccgccgctgcggtacgcgggcggtgcctggcagcggttcacgacgcctggcgggacgtggacgagcgacctgtccgtcgcgccgagcgggcggatctgggtgacgggaagcacgcgcatcgactcacccgtggcgctcacgtctccctga

SEQ ID NO: 132 - protein, 352 aa, Actinomadura sp. 21G792
MRSLPARLAVTAVAFVALAPVSAVHAAPPPATLRDVPLPFLWPRAGVYSVAAVSDTEAWFAGVQGFVNEPGGNPVVRRRMGSEWREYPLRGWSGSGGIQEVVAHGGEVWVWGVQDGTRLYLARFDGTAFQPVAPLSGDVYVYGTRLWAGPAGVWLQIKVVGSDSVIRPELFRRVGDAWTADPLAGQLQGGLPDLNARSATEAWTGSCRYNADAGRLESVALRWNGSTWAALPPLPTEHCVGSVAPAGGGAVWALAWDTLYHWDGTRWTSAPAGPFDGEGEKVRLDKDGNPLVVVGHTIKFAPVPPLRYAGGAWQRFTTPGGTWTSDLSVAPSGRIWVTGSTRIDSPVALTSP

SEQ ID NO: 133 - DNA, 210 bp, Actinomadura sp. 21G792
  CDS (1)..(210)
gtgaacgagggtgtgctcctgctgttcttgcagcggctcttccccgagtggtcgatcacgcgcgaccgggaggacgtgtggcgtgcggccggtcgcgtccacatctcggcgtcgtccagcgacggcctcctggagatgctcgccgtggcggagccgggcgcggcagagcgggtggcacggttcttcggcgccggtcggcaggtggtatga

SEQ ID NO: 134 - protein, 69 aa, Actinomadura sp. 21G792
VNEGVLLLFLQRLFPEWSITRDREDVWRAAGRVHISASSSDGLLEMLAVAEPGAAERVARFFGAGRQVV

SEQ ID NO: 135 - DNA, 1779 bp, Actinomadura sp. 21G792
  CDS (1)..(1779)
atgcagaacgccgaaacggtgctgagtgtcctgcgtggacgcggcagacgagacttgccgtgcaatgaactgtatcgacagttgttcaatccgcagttgtatctgatggcttacgggcgcatctactccaaccagggagcgatgacaccgggagtcaccgcggaaaccgtggacggcatgtcaccggcgaaaatcagccgtatcatcggcgcaatgcgtctcgaacgctaccgattcaagccggccaagaggattcacatccccaaacgtaacgggaagaagaggcctctgggactgccaacctggtcggacaaacttgttggtgaagtgattcgcctcttgctggaggcatactacgagccgactttttccgaccgctctcacgggttccgtccccgccgggggtgccacagcgccctgcgcgaggtcgcacaaacctggacggggacgacctggttcattgagggagacatctctgactgcttcggaagtctggaccatcagttcatgctttcggtgttggcggagaaaatccacgacaaccgtttcctgcggctggtgcgcaacatgctccaggccggatatctggaggactgggtctggagcgccactctcagcggtacgccgcaaggaggggtagtctcgccgatcctgtccaacatctacctgcatcgactggacaactttgttgaaacggttctcataccggagtacaaccggggtgggctgcgcaaacgcagcatcacctaccgcaaggtggaaaagcagctcgcactggcccgcaaacgaggcgaccgcgtccaggcgcgccaacttcgtaagcaattaagcgaactgcccagccaggacatgaacgatcccggctatcgtcggctgcgctatgtcaggtacgccgacgacaccctgctcgggttcgccggacccaagcacgaggccgaggatatcaaacagcgactggcggcgttcctgcgtgacgacctcaagctggaactgtcgccggacaagacactgatcactcacgccagaaccggcgcggcgcgattcctcggctacgagattactgtccaacgcagtgatcgcaggaccaagaagggccgtcgatcagtcaacggagtcgttcagctccgcgtgccaaaaacagtgatcaaagaaaagtgcgccccctacctgaaacgcggaaaacccgcatgcctgccccatctgttcaatgaagacgatcacacaatcgtcagagtttacggggcgatctaccggggggtcgtccaatactacctgctggccggtgacgtcttccgattgaaccggctgcactgggtcatgcaaacctcgctgctcaaatcactggcgaacaagcaccgctcgaccgtgacgaaaatggctcgaaaacacaaggccaccatcgtcacaccgggcgggccgcgaaagtgcctgcaagtccgtgttgaacgcagcggcggcagggaaccattggtcgcacagttcggcggtattccattggtgcggcagaagtcggcggtcctccgagaccgcaaccccgaccggaccggtcaaccccgcaaggagctgatatctcggctcctcgcgggccggtgtgagatctgcgaatcaacggaccaaatccaggttcatcacgtccgcagactcgccgatctcggccgactcggccagtcaccgccaaggtgggcgcagatcatggcaaaaaggagacgcaaaacattgattgtctgtcaaccctgccacgacctcatccacaccggccgacccaccgcatccacgtag

SEQ ID NO: 136 - protein, 592 aa, Actinomadura sp. 21G792
MQNAETVLSVLRGRGRRDLPCNELYRQLFNPQLYLMAYGRIYSNQGAMTPGVTAETVDGMSPAKISRIIGAMRLERYRFKPAKRIHIPKRNGKKRPLGLPTWSDKLVGEVIRLLLEAYYEPTFSDRSHGFRPRRGCHSALREVAQTWTGTTWFIEGDISDCFGSLDHQFMLSVLAEKIHDNRFLRLVRNMLQAGYLEDWVWSATLSGTPQGGVVSPILSNIYLHRLDNFVETVLIPEYNRGGLRKRSITYRKVEKQLALARKRGDRVQARQLRKQLSELPSQDMNDPGYRRLRYVRYADDTLLGFAGPKHEAEDIKQRLAAFLRDDLKLELSPDKTLITHARTGAARFLGYEITVQRSDRRTKKGRRSVNGVVQLRVPKTVIKEKCAPYLKRGKPACLPHLFNEDDHTIVRVYGAIYRGVVQYYLLAGDVFRLNRLHWVMQTSLLKSLANKHRSTVTKMARKHKATIVTPGGPRKCLQVRVERSGGREPLVAQFGGIPLVRQKSAVLRDRNPDRTGQPRKELISRLLAGRCEICESTDQIQVHHVRRLADLGRLGQSPPRWAQIMAKRRRKTLIVCQPCHDLIHTGRPTAST

SEQ ID NO: 137 - DNA, 180 bp, Actinomadura sp. 21G792
  CDS (1)..(180)
gtgccacgttctgcgcggggatgttttgccgcctggcgcaaccttcgggacgtggagcgatgtccaacgaggacattcaaggagacgaacgggccgcctaagtcatgctcggacgtacatcagagacgaacgtgggatcacctaaggggtgcgaaccctaaggtgacggagtgctcgtag

SEQ ID NO: 138 - protein, 59 aa, Actinomadura sp. 21G792
VPRSARGCFAAWRNLRDVERCPTRTFKETNGPPKSCSDVHQRRTWDHLRGANPKVTECS

SEQ ID NO: 139 - DNA, 78 bp, Actinomadura sp. 21G792
  CDS (1)..(78)
atgatagggcgaaagctggattgcctgaagtccagtctccagtcgacgaaaagacgcgtccatcggaaagatacctga

SEQ ID NO: 140 - protein, 25 aa, Actinomadura sp. 21G792
MIGRKLDCLKSSLQSTKRRVHRKDT

SEQ ID NO: 141 - DNA, 504 bp, Actinomadura sp. 21G792
  CDS (1)..(504)
atgtgcatggagtcacggaaattcggaggtgacggttatatgaccgaaccggcaaccctcgtgatcaaggcggatccgggggcgatcaagcaggcgcgcgacttcgtcgcgatgacgttcggggcgtggcggctggacgacgacgtcgcccggacggtgatcagcgagctggccacgaacgcggtcaggcacgggtcgcgggcgggcgatcccgtggtcgtccgggcctaccggcgggacgacggcgcggtcgtggtggaggcgtgggacgggtcggacgcactgccgaccgtccgtccggtgaactacgccgccgagtcggggcgcgggctgctgctcatcgaggcgctcgtgcgccggtggggcacccgtccgctgagcgagggcgggaaggtcgtgtgggccgagtgcgccacgaggcgctctgatgtatccccggtgcagccgggagagattcgaagggagatctctgggtcgaatggcttacctggatctgaaaggtga

SEQ ID NO: 142 - protein, 167 aa, Actinomadura sp. 21G792
MCMESRKFGGDGYMTEPATLVIKADPGAIKQARDFVAMTFGAWRLDDDVARTVISELATNAVRHGSRAGDPVVVRAYRRDDGAVVVEAWDGSDALPTVRPVNYAAESGRGLLLIEALVRRWGTRPLSEGGKVVWAECATRRSDVSPVQPGEIRREISGSNGLPGSER

SEQ ID NO: 143 - DNA, 780 bp, Actinomadura sp. 21G792
  CDS (1)..(780)
atggtcacgcggaagcccaccccccagacgctcgccttcggcgcggaggtcgcccgcctgcgtaaagagcgcgaactgtcccgagtcgagctggccaagctcgccgccgtcacccgctcgtacatcgcccaggtcgaactcggcacgacccgatgccgccaggatttcgcggagcggctggacgatggcatgaagtgcgcgccgaccctggtggacgcctggaccgaccttctgagttcggcggcctaccccaagttcttcgtcgactacccgaaggccgaggccacggccgtcctcctgcgcgcgttcgaactcacagccgtgtacgggttgttccagaccgaggcgtacatgcgcgccctcctcgataccgagcaggccgtcgagtcccgcatcaagcgtcaggccatcctgaaacggcaacatccgcccaaggtcagcgtcgtgctcagcgaaagcatcctttatgccgaggtgggcggcccgactgtcatgaaggagcagtgcgagcggctcatcgaagtggcccagatggggaacgtcgtgctccagatcgctcccaccgggcgctactggagactcgacggcccattcaacctggcaactcagcccaccggtcaggagctgctctacatggccaacgctcgcggtggagtgaccacaagcgacccggccgatatcttgtacgtcgtcggtgcgttctcctttatccaggcccacgcgctgagtccgagcgagtccctggagctcattcagaaggcggttctccggtggagctga

SEQ ID NO: 144 - protein, 259 aa, Actinomadura sp. 21G792
MVTRKPTPQTLAFGAEVARLRKERELSRVELAKLAAVTRSYIAQVELGTTRCRQDFAERLDDGMKCAPTLVDAWTDLLSSAAYPKFFVDYPKAEATAVLLRAFELTAVYGLFQTEAYMRALLDTEQAVESRIKRQAILKRQHPPKVSVVLSESILYAEVGGPTVMKEQCERLIEVAQMGNVVLQIAPTGRYWRLDGPFNLATQPTGQELLYMANARGGVTTSDPADILYVVGAFSFIQAHALSPSESLELIQKAVLRWS

SEQ ID NO: 145 - DNA, 435 bp, Actinomadura sp. 21G792
  CDS (1)..(435)
atggcgcgaccggcggtgggcatcgaggtgatcgcgcgtgcggtcgtccggacgtcggcggggctgctgctggcgcggttgcgcgggacggactggtggttcctgcccggtggccacgtggagcccggagagccggtggcggccgcgctcgtgcgtgaactcggcgaggaactcggcctgaccgtcccggcccccgcgatgatcgggacggtcgagtccgcctacgtggaggacggcttgcatcggcacgaggtcaacctcgtgttcgccgtcgacgtcgcggacggcgaggagttcgtcgcactagagccgcatctggagttcggggtcgtgccggtcgaggcgctgggcgacgtggagatccgtccggcgacgctggggcgggccgtgcgcgcctggctggacgatgcccgtccgttcgccgtcgcgctgtag

SEQ ID NO: 146 - protein, 144 aa, Actinomadura sp. 21G792
MARPAVGIEVIARAVVRTSAGLLLARLRGTDWWFLPGGHVEPGEPVAAALVRELGEELGLTVPAPAMIGTVESAYVEDGLHRHEVNLVFAVDVADGEEFVALEPHLEFGVVPVEALGDVEIRPATLGRAVRAWLDDARPFAVAL

SEQ ID NO: 147 - DNA, 594 bp, Actinomadura sp. 21G792
  CDS (1)..(594)
tccatggccgcggcggcgctgaccggttcactgccggaaacggcccgcagcaccgggcaagtgagcgtcaacggcgaacccgtcgacggccgccgcgaatggctccgccttcgcggccgcaccgtcgggttcgtcccgcaggacggcgtcacggccttcgatccctgggaaaccgtgggcgcgcaactgcgcggactcgaacgccggcacgggcaatggagcctcgaccgcgcgtgcgccgccgcccgctaccccacggacctgttcgacctctccccgaaacagcattccggcgggcagatccagcgcgccgcgctcgccgccgcgctcctgcccgcacccgccgtcctcatcgccgacgaaccggccgcctccctcgacaccgagaacgcctacgcggtgtggacgaccctctaccggtacgccgccgccggagcggccgtcctgatgatcacgcacgacgtggccatgctcaccgccacccggatcgccgaccgggtggtgctcatgcgcggcggcagggtcgtcatggcgggcgacaccgccgacctggccgcgcacaccgaccagtacgcgcgcggcttccagatctga

SEQ ID NO: 148 - protein, 197 aa, Actinomadura sp. 21G792
SMAAAALTGSLPETARSTGQVSVNGEPVDGRREWLRLRGRTVGFVPQDGVTAFDPWETVGAQLRGLERRHGQWSLDRACAAARYPTDLFDLSPKQHSGGQIQRAALAAALLPAPAVLIADEPAASLDTENAYAVWTTLYRYAAAGAAVLMITHDVAMLTATRIADRVVLMRGGRVVMAGDTADLAAHTDQYARGFQI

SEQ ID NO: 149 - DNA, 402 bp, Actinomadura sp. 21G792
  CDS (1)..(402)
gacaccgtcacggtcaactacgactgcgtcggctacccgtcggacatcgccgtgaccatcgacgcgccggccacggccggcgtgggcgacaccgccaccttcgaggtcagctccgtggtgaccaccggcgccccgcaggacctccccgccggggaggtcgtgaccgacatggcgatcgtggtgggcggtgcccagtccggcaccatcaccgcgagcggcctgacgaacgaggccacccccgccggccagcccgtgaacatggtcggcggcgaggcccagatcacgttcacctcggccggctccgtcaccttcaccccgtccaccaccacccaggtcgacaacggcgcgcagtgcaccgtcgtcggcgaggccccggtcggcgccacgacggtggtctcctag

SEQ ID NO: 150 - protein, 133 aa, Actinomadura sp. 21G792
DTVTVNYDCVGYPSDIAVTIDAPATAGVGDTATFEVSSVVTTGAPQDLPAGEVVTDMAIVVGGAQSGTITASGLTNEATPAGQPVNMVGGEAQITFTSAGSVTFTPSTTTQVDNGAQCTVVGEAPVGATTVVS

SEQ ID NO: 151 - DNA, 90573 bp, Actinomadura sp. 21G792
tcgcccgtgtcatcggcccggtcgtcgacgtggagttccccgccgacgccatcccggagatctacaacgccctccacgtggaggcgaacatcggtggcgacacccagaccctgacgatggaggtcgcgcagcacctcggcgacaacatggtccgggccatctcgatgaagcccaccgacggcgtcgtccgcggcgcgcccgtcgtcgacaccggcgagccgatctcggttccggtcggcgacgtcaccaaggggcacgtgtggaacgccctcggtgagacgctggacgtcccgacggcctcccttcaggtcaacgagcgctggggcatccaccgcaaggcgccggcgttcgaccagttggagtcccggaccgagatgctggagaccggcatcaaggtcatcgacctcctctgcccgtacgtcaagggcgggaagatcggcctgttcggcggcgccggtgtgggcaagaccgtcctcatccaggagatgatccggcgtgtcgcccgcaacttcggcggcacctcggtgttcgcgggcgtcggcgagcgcacccgtgagggcaacgacctctgggtggagatggaagaggcggacgtcctcaaggacaccgcgctcgtgttcggccagatggacgagccgccgggcacccgtctgcgggtcgcgctgtcggcgctgacgatggccgagtacttccgcgacgtccagaaccaggacgtgctgctgttcgtcgacaacatcttccggttcacccaggccggttcggaggtctccacgctgctcgggcgcatgccgtccgcggtgggctaccagccgaccctggcggacgagatgggtgtgctccaggagcggatcacctcgacgcgcggtcactcgatcacctcgatgcaggcgatctacgtgcccgccgacgacatcaccgacccggcgccgcacaccacgttcgcgcacctggacgccaccacgacgctctcccgggccatcaccgagaagggcatctacccggcggtcgacccgctcgactcctcctcgcggatcatggacccgcaggtgctggggaacgagcactacgaggtcgcccaggaggtgaagcggatcctgcagaagtacaaggagctgcaggacatcatcgccatcctcggtatcgacgagctctccgaagaggacaaggtcaccgtccagcgggcgcggcgcatcgagcgtttcctgtcgcacccgatgtacgtggccgagcagttcaccggccagcccggtgtgacggtgccgaaggacgagacggtcgcgtccttcaaggccatcgcggagggcaagtacgacagcatccccgagcaggcgttcttcatgtgcggcggcatcgaggacgtcgagaagaaggccaaggagctggagaagtagtccgctccgatgccgccgggtcccggggatcggggcccggcggtgtcggaaccggaccgcttcgctgatcggaggattgtgacgtggcaaccctgaaggtcgggctcgtctcgccggagcgcgagatctggtccggcgatgccaagatggtggtcgcgcagaccatcgagggctcgctcggcatcctgccggggcacgctccggtgctcggcgtcctcctcgacggcagcgtggtcaagatcgagcccgccgatggcggcgagccggtcaccgcgatggtcggcagcggcttcttctccgtcgcggccgacgaggtgtcggtgctggccgagcaggccgagctgagccacgaggtcgacgtcgaggacgcgcggcgcgcgctcgaggcggcggaggcgtccgccgacgaggacacgacggcggagcggcgggcccgcgcgcggctgcgcgcggcgggcgtcgaagcctaggatcgaggccctatagcgggccgagcggaacggcggggggaattgggcgagcacgtggcactggacgtcggcgcggtgctcgccgccctcgccgcggtgtgcgcgctcgtcttcctcgcgatggcggtacgccgccgcctgttcgtgcgcggcggcggcgcggtcgagtgcagcctgcgggagctgccggccgaggagggcggcgccccgggggtgtggcgcctgggcatcggccgctacaaaggcgatgtcctgcactggcaccgcgtgttcggactcagcagaaggccccggcaggtgatccaccgccggggcctcgtcgtgtccaaccgcaggcccccggggccggaggaggccgagggcctgctgccggacgtgagcgtcatcgaggtccgcgacggcgacctgaccgtcgagctggcgatgggcgcgtccgcgctgaccgggttcctggcgtggctggaggccgcaccgcccggcttcccggtggacctccacgtccccgagtagcccccgagtagcccccgagtagccctccgggaggctggggcctgaggccgaggagccgccggggccaggaagatgcggccgcccggccgcccggctgctggggctgcccggccgccaggggcctgagccggatctacggcttcgtccgttcgtctcacctcccggttcggcgcggttcggcaggggcgggtaagggcgcggtatcggttcgtcccgggtgcggtcgtgcggcttgccggtcaccgagcgtgcggagatgatcgctgctggtcagctctctttccgttcgcaggagtccaagtgcgcaagctgctcagtggttcggccgtggcgctgcccgccgcgaccgtgttcctcctggcgctgtccgccgtgccgccggccggtgccgctcccgccgctccggtcgcgctcgtcggtccgggggcggcgcccgaccgtcccgacctcgccgagctggtgacgatcgaggacgtgcggcggcatctggaggcgttccagcagatcggcgactacaacggcggcaaccgcgcgtccggcacgcccgggtacgagatctcggtgaagtacgtcgtcgggcggctgcgcaaggcggggttctcgccgaccgtgcagaagttcacctacccgtactggacggagcgttcggtcgcggtgatgtcgcgagcggcaggcgagggcaagggcaagggcaaaaccaaggacaagggcaaggacaaggcgtacgtggcgggcctggacttcgccacgatgatgtactccggttccggggacgtcaccgcccgcgtgatccccgtggacgtcccggccaagggcgcggagggcaccagcgggtgcgagaaggcggacttcaaaggcttcgccaagggctcgatcgcgctgatgcagcgcgggaaatgcacgttcgagacgaaggcggcgcgcgcgcggtccgccggtgcggctgcggcgatcatctacaacaagcccggtgagaagggcccgatcgacgggacgctcgacaagccggcgaagctgccggtggtgggcgcgagccgcgaggtcggcgccgagctggtgaaggcggcggccaagggcggcctgacgatgcgggtgaagaccgacaccgagcacggtgagcggtcgtccagcaacgtcatcgtcgacacgaagcagggacgtgccgacaacgtggtggtcgtgggggcgcacctcgacagcgtgcaggacgggccgggcctcaacgacaacgcgaccgggtcggccgcgctgctcgcggtcgcggaggagatcggcgcgctcggtgaggacgggctgcggaaccgggtgcggttcgcctggtggggcgccgaggaggaggggctgcacggttcgacgcactacgtcgagaagatggacccgtccgaccggcggaacatcgcggtgaacctcaacttcgacatgctcggctcgccgaacgggatccgcgccgtgtacgacggcgaccactcgctcggccagggcaccaccccgccggccggttcggcggcgatcgagaagatgttccgcgagtactacagggcgcgcgacctgccgaccgccgaggccgtcttcaacgggcgctcggactacggcccgttcatcgaccacgacatcccggccgggggcctcgccaccggtgcggacggcgtcaagacggcggccgaggcgaaggcgtacggggggcgcgcgggcaagacctacgacccgtgctaccacgcgaagtgcgaccggatgaagaatgtgaacatgaagctgctggacacgaacgtcgacggcgtcgcgcacgtcacgcagctgctcgcggccagcacggtcgcggtgaacggcgacgcccggctgctgccggcggcggtcgacgcggcgggcccgctgtggagcggcggtcacctgatccgctgagcggccgggagagcggaggggcggggccggcgggccccgcccctccgcgttcccgagtcctccgggtcggctcccgttctagcgctcgccgccgggcttccacaggatgtcgccgtgctcggcgttcgcgaccctgcagaggatgaacagcaggtccgacaggcggttgaggtactgcacggccagcgggttgacgccgccctcggtggcctcggggtcgcccacggcggcggtgccgtgcgcctcgaccgccgcccacgcggtgcgttcggcgcgccgcgcgacggtccgcgcgacgtgcagcagcgcggcgccgggggccccgcccggcaggatgaagctgcgcagcggccgcagcttctcgttctgctcgtcgcagtcggcctcgagccgctcgatgtaggacggctcgatgcgcaggggcgggtactcgggatccgggacgaccggtgcgcacaggtccgcgccgacgtcgaacatctcgttctgcacgcggacgaggagcgccgcgacgtccgcgggcagggagccgagggagagcgcggcgccgatcgcggcgttggcctcctccacgtcggcgtaggcggccaggcgcgggtcggtcttgcgggtgcgggacgcgtcgccgagcgcggtcgtcccttcatcgcccgtacgggtgtagatccgggacaggacgacggggttctccctgttcttcgccatgtcggccaccctacgccgggccctgttccgaaggacgttcggtagtgttcgaccgacattgtcccttcgggaggcgtcgtgtacgactacatcatcgtgggtgcgggcagcgccggatgcgtgctggccgcccggctgaccgaggacccgtcggtcacggtgctgctgctggaggcgggcccgcccgacgacgcccccgagatccgcattccggccgccgtcgcgtcgctgatcaagggcccgtacgactgggactacgcgaccgtcccgcaggagcacgccgccggacgcagcgtgtactggccgcgcgggcggacgctcggcggcagctcgtccaccaacgcgatgatctacatccggggttcccggcacgactacgacacctggcgggacgagcacggctgcgtcggctggggctacgaggacctgctgccgtacttccgcggctcgcaggaccagcagcgcggcgagaccccgtaccacggcgtcggcggcccgctccgcgtcgaggacctgcggttcaagcacccgctcacgcaggcgtgggtgaagtcggcgaaggcgcacgggctcgccgccaatcccgacttcaacggcgccgaccaggacggcgtcggcttctaccaggtcacgcacaagcgcgggcgccgctggtcggcggccgacgcgtacctgcacccgaacgagtaccgcccgaacctgaccgtcgtcaccgacgcgctcgcgacccgcgtcctgatcgaggacggacgcgcggcgggcgtggcgtacgaggcgcgcgggaagtcgctgaccgcgcgggcgaacgccgaggtcgtcctgtccggtggggcggtgaacagcccgcagctcctcatgctctcgggcgtcgggcccgccgaccatctccgcgagcacggcatcgacgtgctcgtcgactccccggtcggccggaacctgcaagaccatccgttcgtgaacgtcatgttcgccacgccccggaccaagaacctctgggagcaggccaacccgctcacgttcgcgctgcacgccgctctggggcgcggcccgtacgcgtcgaacgtcgccgaggcgggcgggttcgtccggacggccgaggggctccccgccccggacctgcagtaccacgtgctgccgaccccgttcatcgaccaggggctcgtcgagccgtcccagcggctcctgtcggtcatggtcacggcgatcgcggtccagagccggggcgcgctcacgctccggtcggcgaacccacacgccaagccgctgatcgaccccgcgtacctctccgcggaggccgacctcgacatcctggtggccggggtgaagcaggcccgcgcgatcgccgacacgggcccgctcgcgtccctgctcggcggcgagttcgcgcccggcgagcaggtgtccgacgacgcggcggtcgtcgagttcgtccgccgggagtgcgcgacgctcttccacccgacgagcacgtgcgcgatgggcgcggtcgtggacaccgagttgcgcgtgcggggggtcgacggcctgcgcgtggtggacgcgtccgtcatgccgtcggtcccgcgcggcaacacgggcgccccgacgatcgcgatcgccgagcgggcgtccgatctcatccgcggcaggaccccgctcaagcccgcgaacgcctgagggctcccggcacgacgaggaacgcccccgtccggatcggacgggggcgttcggtgcgcgtcgcgcgccgggcgcgtacagcctgcgggcgtcaccgcttgagggccttcgcgatccggacgcggcgggccttgcgggcctcggcccggcgccgccgtacgcggtcgtcgatgatgtcctgggtgatctccgggcggatcatggcttctcctcggttccgccgggccctcgtggcccgacacctacgaggttcgtcctaaggcggcacccgccgcatcggtactgagccttatcctcgcgccccggaaccgccttagccgtcccggcgccttaggcggcctgagcccggccgtcagccgacctcgacgaagccgaggcggtggtagaggaggcgggcgcggcggtttcgcctggtcacggcgagggtgagggtgtcgtggccgcgctcggcgagcacgtgcatgaccgccaggacgagttcgtgcccgagcccccgacccgcgtgcgacggcgcggtgaacaggaacgcgagcagcggctcgtcccggtagacggtcacgagggcggcggcgacgggacggccgtccggttcggcgacgaacgacgccccgggcaggaacgtcccgtactcgccgtccagcgttcggcgcagctcgcgcagcgcgccgtcggggccaccgacgtcgccctcgtcgggggtgccccggtaggcgtcccacatgagggcggcgagggcgggcaggtcggcgcgcgtgaacgggcggaagccgtccgggggcggcggcgccgggcgcagcggagcccgccacccgctgcgcaccggtgcgggaccgccgtccatgatcacctcttgtagtgcttgccgtgcagcatgttgatgaggccgaggacgcgcgccatctccttgtcggagcgggcgaacgacgtcaggttcatggtcgtgaaccgctgccgggtgatcgccttcgggcgggcgaactcgcgcagcccgtccgcgccgtggatgcggccgaagcccgactccccgacgccgccgaacggcagcgcggcgacctgcgcgaacgcggcgaacgcgttgatcgaggtcatgccggagcgcatcgtgcgggccgcctccatcgcgcgggccttgttgccggagaagatcgtcccggccaggccgtaggcggtgcggttggccttctcgacggcctcgtcgagcgacgcgacgcggtggacggtgatcgtcgggccgaacgtctcctcgcagacggcggacgagtcgtccgggacgtcggtgaggacgaccggctccacgtagggcttgcggacggactcgggcccgccgacgacggccttgccgccccggtcgatggcgtccttgatgtgccgctcgatgatctccagctggccgggcatcgtgatcgggccgtaggcggcctcgcggtcgaagccgggacgcagctcgcgggccttgtcggtgagcttgccgaggaaggcgtcgtaggcgcggtcgacgacgtagatccgctcgacgccgatgcaggtctgcccggcgttggacatcgcgccccacagcgcggcgtcggcggcggcgtcgaggtcggcgtcggcgtcgacgatgcaggcgtccttgccgccgcactcggccacgatcggggtgaggttctcggcgcacgcggccatcaccttcttggcggtgcccgccgagccggtgaacgcgagcttgccgatgtggggggatgaggcgagcgccgcgcccgtcgcgccgtacccggtcacgacctggaggatcgggtgctcggggacgacgccggcgacgagttcggcgaggtaggcgccgacgcccggggtgaactcggacggcttgaagacgacggcgttcccggcggcgagcgcgtacgcgatcgagccgatcggggtgaagatcgggtagttccaggggccgatgacgccgacgacgccgagcggctggtactccagcgtgcacttctggttgatcgccatcatgcccgggaagacggtgcgcggcccgagcaccttctgggcgttgcgcgccgcccagtccaggtgcgagatcgccatgatcgtctcgagttgggcgtcggcgaccggcttgccggtctcctggtggatgatctcggccatccggttgaggttgcgggcgagcgcgcccttgacgttgagcagccgcagccgccgctcgcgccggcccagctcgccccaccagcgcgacgcctcccgggcccggtcgatcgcggcggccacggcggactcgtcgtggatcgggtactcggcgacgacctcctcggtcgccgggttcagtgacgcgaacgtcttctcgttgctctccgtggccacggacatgagaacctcccgggagggctgtaagtgttcgctttcatgtgcggtaccggctagtaaagcaccctatgttcggtgatcgcagcagtgccccggaccgtcgtcgggccgtccgggcgtccaccggccccttcccgtgccgatgatcttccatccgggggccggttcgagcgccgcggcgggcccgccgccgccccgggcgccgtcccgtccctcaacacggcaactcaagagatgtgcccgttttgcgcccgtatcagcatgaaggggtctggtcgtcatcgggaggcgcgatgtccactctcctcggaactctgcgcaggaccgtgctcgccccgtccctggacgaggtgacgttcgcgcggcgcggcttcccctccgggcccgcgggcccggcgacgcggaagctggaggccatcccgcagtcggtggtctgcggcttcgagtggggcatcgagatccgcggtctggcggagctggagcggcggctggagttcgtgacgccggagctgcgggggttcgcctacgagggcgcgacgatggcctgcacgatccgcgacgcgatgcgcgccgggcgggggcaccgcacccgcgacctcctgcgggggccgggccgtccgcacatcttcctctcctacatcggcatcgggttcgccatggcgcggctgccgcggatcctgtggaagagcgtgctgccggacctgcccggcgcggcctactacccggcgatgacctggctggcggtcgacggctacggcttcgacctggcctacttccacaccgaccggtgggtgggacgccaggaggtgcccgcgccctacccgtgggagggcgcgcccgactacttcccgcgcgccgtcgaccaggggatcggccgggccctgtggttcatctgcggcggccgcgcgcccgaggtcgccgccgccgtccgccgcttcgccgcgcaccggcacgccgacctgtggagcggggtcggcctggccgccgcgttcgccgggggcgggacggccgagggcctggcggtgctgcgccgcgaggcgggcgagcaccggcccgagctcgcgcagggcgtcgtgttcgccgtcaaggcccgctcgtacgccgggcacgtgcccgcgcacaccggaaccacggtcgccgcgctcgcggacgtgaccgtcgacgcggcggtcgcgctggccgacgacgccgaggccggtaccggacgcgcgcgtccggtaccggcctacgagctgtggcgggggaacgtgcgcgcccacttcgcccgcctggagcgggccgccgggtgatcccggcccgctcgcccgccgtgcgccccgccgcgcccggcggcgttcacgtatttctccgaaacggccgttcaattgcgtccgcgggacgcaactgttcacgctattgaattattgcgctccgggtccgcacggatgaagtagaaacggggcggcgcgatctggctgaatttaagcgaaacgcggctgcccgcttccgggcgaagcgccgaatgcgtcccacggtcgtcgattggggaatacattgaccgccgtactgagaaaactggccaggcgtgtcctcaccccggacaaggctgagaccagcctggaaaagcgcaagttccatgtgaagaacgccgccggccgggaggtactggagacggtcggcgagagtttcctggcggggttcggccacgccgtcgaatcgggtgcaccggacgagatcccggggctgctccggcccgtcccgacgcggtaccgggggttcgcgttcgagggcgcggcgatgggtttcgcgacggtcgacgcgctgacgttcgcgcgcggccggcggacggacgcgtacctgcggggaacgggcgacccgcacgtctacatggcctacatcggggtcggctgggcgatggcgcggctgccgaggttccgctggccgaagccgcccgcggaccccctcatgcggtggttcccgctcgacgggtacggcttccaccaggcgtacttcaagaccgaccagtacgtccaccggcactaccgggcggcccggttcccctggccggcgcacgacccgcacggctacgccgaccgcgccctcgaccagggcatcgggcgcgcactgtggttcgtcggcggcacggacgccgacgtggtggccgggctgatcgagggcttcgcccccgaccggcggtccgacctgtactcgggcgccgggctggccgccacctacgcgggcggcgcggacgaggacgagctgcgcgggttctggaagcgcgcgggcgagcaccgcccgttcgtcgcgcagggcagcgcgttcgcggcggaggcccggcggcgcgccggactggagacgccgcacacggagatcgggacgcgggtcttctgcgacatggaccccgaccgggccgcgcaggtctgcgtcgaggcgcggcccggacgcgaggaggcgctggaagaggacgggggcgctcagcccgcgttcgaggtgtggcggcggcgcatcgccgacgagttcgcagcgaaggggaggtgctaggccgtgtccgcgagctatggctggctgcgcaagcagctaccgggcgttgtggcgctcgtactggtggtcggggcgttcttcgtggtcaagctgcccgaggcgcccgccgccgagaaggccgatgtggcggcccggtacgggttcgagccgatgagcatcgcgatgccgggcggcttcgcgcagcagacgatccgcgaggtcaacaaggactacgagaacatcgacgcctggatctcctccgtcggagccggcgtcgcgatgaacgacctcgacggcgacgggctgcccaacgacctgtgcatcaccgatccgcggatcgacagggtcgtggtgaccccggctccgggcgcccgctcggaccggtacgcgtcgttcgcgctggagaccggcccgctgccgatgaacgacgcgatggccccgatggggtgcgcccccggcgacttcaacgaggacggccggatggacctgctggtctacatgtggggccgcaccccgatcgtccatctcgcccgcgcggacgccgagaagctgacggcggacgcgtacgtcccgaccgagctggtgccgaacgcgggcggccgggcctacacggggccgcagtggaactccaacgccgtggcgatcgacgacttcgacggcgacggccactacgacatctacctggggaactacttcccgcacggtcccgtgctcgatccccgcaagagcggcggcgtcgagatgaaccggtcgctgtcgaacgcgaccaacgccggggaggactacttcttccgctggacgggcgccaccgccggtgaacgtccgtcggtcgagttcgagcagctcgacgacgtgctcccgcgcgagatctccaagggctgggtgctggcggccggggcgaacgacctcgacggcgaccagcgccccgagctctacatcgcccaggaccacggcaaggacgccctcctctacaacatttccactcccggaaagatcgaattccaggccgtgcacggggcccgcactccgggcctgccgaagtcgctgcggatcggcgacgattccttcaagggtatgggaatcgatttcgccgatttcaatcacgacggcctgtacgacatgttcgtcagcaacatcacgacgacgttcggcatccaggagagcaatctccatttctacaacaccgcgaagaaccaggccgatctccggaccaggctgcgtgacggagacgcgccgtggacggaccgcagcgccgacaagggcaccgcgtggtccggctgggcctgggacgtcaaggtgggcgacttcgacaacagcggcgaccccgccatcgcccagaccaacgggttcgtcaagggcgaggtgaaccggtggccccagctgcaggaactcgccgcctccaacgacctggtcgtggaggacccgcgctggtggccgcacgtgcgggccggtgacgacatcgccggcagccagcggctgaccttctgggccccggacgacgacggcgggtacgtgaacgtgtccgacgagctcggcctggccatcccggtgcccacccgcgggatcgcggtcggcgacgccgacggcgacggccggctcgacatggccgtggcccgccagtgggaggagcccgtcttctaccacaacaccgccccgtcgccgggcgcccacctcaacctgcggctgacgcacgacaccgaggacggcgactccggatcgggcggctccgagccggccgagggcgcgctgcccgcgccgggcagcccggtcgtcggcgcgcaggtgaaggtcaccaccccggacgggcgcgcgcacctggcccgggtggacggcggcagcggccactccggcaagcgcagcgacgaggtgcacatcggcctgggcgcgggggtcaccggccccgtgcgggtcgagctgtgctggcgggaccgctcgggcacggagcaccgccaggagctgcggctcgcccccggccggcactcgctacggctcggcgccggcgccgaagtcgtccggcccgaccagccccaggacacgcagaccccggccgaggaggaatgaccggacatgtccgagaccaaggcaaccccaccgcgtcacgacccgaaggtcgtcacggcgctgcgcaacttcgccatgtcgatgtcggtcttcaacatcctgggctacacgatcctcgggttcgagcagccgtggacctggccgttcatcgcgctggccaccgcgtacacgttcgaggccctgctggaggccatcggggccaaggtggagggccgcaccccccgcttcgcgggccgcggcttccgcggcgtcatggagttcctctacccggcgcacatcaccgccctggcgatgaacatgctgatctacgtcaatgaccgcgtgtgggtcatggtcttcggcgtgttggtcgcggtcggggccaagtgggtgctgcgggccccggtgcggggccgtatgcggcactacatgaacccgtcgaacttcggcatcaccgccatcctgctgctgttcccgtgggccagcatcgccccgccgtaccacttcaccgagcggttcgacgcccccgtcgactggctcgtcccggtgatcatcctgagcgcgggcacgatgctcaacgccaagctcaccgggcggatgtggctgatcatgggctggctctcgatctacgtcgtccaggccgtggtccgcggctggctgctggacacctcgatcccggcggcactgatcatgatgaccggcgtcgcgttcgtcctctacaccaactacatggtgaccgaccccggcaccagcccgtcggcgccggccgcgcagttcgccttcggcggcggcatcgcgatcatctacggcttcctcaccggggcgggcatcgcgtacggcctgttcttcgcgacggcgctcgtctgcctcatccgcggcgtctacctgtgggcgctgcacttctcgaacaaggcgcgcgaggaacgggcgacggccgaggccgccacccacgacgccgccgccaacggccggtccggtgccggacggcccgactccggcaaggaggtcgtgcccgcatgagcagcacccgcctcgccgtcgtcggtgcggcatgccgctatccggacgcggcgtccccccgggagctctgggagaacgccctcgccgggcgccgcgcgttccgccggctgcccgacgagcggatgcggctggaggactactgggacgccgatcccgccgcccccgaccggttctacgccagcaaggccgccgtcatcgagggctacgagttcgaccgcgtcgcccaccgcatcgccggcagcacctaccgctccaccgacctcacccactggctggcgctcgacgtcgccggacgggcgctggccgacgcgggcttcccggagggccgggacctgccccgcgagcgcacgggggtgatcgtgggcaacaccctcaccggcgagttcacccgcgccaacgtgctgcggctgcgctggccgtacgtgcggcgcgtggtggccgccgggctccgcgagcaggaaggctgggacgacgaccggctgggcgcgttcctggacgacctggaggaggcgtacaaggaaccgttcccggccatcgacgaggactccctcgccggcggcctgtccaacaccatcgccggacgcgtctgcaaccacttcgacctcaagggcggcggctacacggtcgacggcgcgtgctcgtcctcgctgctgtcggtggccacggcctgccggtcgctgctcgaccgcgacatcgacgtcgcggtcgccggcggggtggacctgtccatcgacccgttcgagatcatcgggttcgccaagacgggcgcgctggcccgcggcgagatgcgcctctacgaccgccgctccaacggcttctggccgggggagggctgcggcatggtcgtgctgatgcgggaggaggacgcccgcgcccaggggcggcggatctacgcgaccgtcgccggctggggcgtctcgtccgacggccgcggcggcatcacccggccggaggccgacggctaccggctggcgctgagccgcgcgtacgagcgcgcgggcttcggcatcgacaccgtcgcgctgttcgaggggcacggcacgggcaccgaggtcggcgacacgaccgagctgacggcgctgtcgctggcccgccgggcggccgccccgcaggccgcgcccgccgcggtcggctccgtcaaggggatgatcgggcacaccaaggccgcggccggcgtggccgggctgatcaaggccgtgatggcggtccgcgaccaggtcctgccgccgaccaccggctgcgtcgacccgcacccgctgctcgcggacgacgacgcggcgctgcgggtgctgcgcaaggccgagccgtggcccgcggacgcgccggtgcgcgcgggcgtcaccgcgatgggcttcggcggcatcaacacccacatcgtgctggagggggcggacgagcgcaggcgcgtcccgttcgacacccgcacccgcgcgctggcggcgtcggtccaggacgccgaactgctgctggtcgacgccgactccgcggacgcgctgcgggccagggtcgcggaactggccgagttcgtgccgaaactggcgtacgcgcagctgtccgacctggccgccgtgctccagcgggacctgggcgaccggccgtaccgggccgccgtcgtggcctcctcgcctgagcacgcggaggcgcgcctccgccgggtgctggccgtgctggagtcgggggagagcggcctgcacgcccccgacggcggcgcgttcctcggccgggtgagcgggcggggccgcatcggcttcctgttccccggccagggctcgggcaccggcaccgccgggggcgcgctgcgccgccgcttcgccgaggtcgaggacgtctacctgcgggcgaagctgcccgagcggggcgacatgatcgccacgcacgtggcgcagccgcgcatcgtcaccggcgcgatggcggggctgcgggcgctgtccctgctgggcctggaggcggaggccgcggtcggccacagcctcggcgagctgtccgcgctgcactgggccggggcgatggacgaggacgcgctgctgcgcgtcgcgggggtgcgcggccggaccatggccgagcacagcgcgtccgggacgatggcgagcgccaggtgctccgccgccgaggcggcggcgctggtcggggaccgtccggtggtgatcgccggtcacaacggccccgcccagaccgtgctggccggttcggtcgaggacatcgaggcggtgggccgcgacgcggcggcgaacggggtcagctgggtgcgcctgccggtctcgcacgccttccactccccgctggtcgccccggccgccgacgccttcgcccgcgagctcgacggcgaacggttcgggccggtcggacggcgcgtggtgtcgaccgtcaccggcgacgggctggccgccggcgccgacgtccgggcgctgctgcgccgccagatcaccgacccggtgctgttcggccgggcggtggaggtcgcggccaaggacgtcgacctgttcgtgaaggtcggccccgggcgggtgctcaccgggctggccaccgacatcaccgaggtgcccgccgtcgcgatggacaccgacgacgagtcgctcggcgggttcctcaccgtgctcgccgccgcgtacgtgcgcggcgcgcccgtccggcacgaggtcctgttccacggcaggctggcccggcccctggagatcggggcggagttctccttcttcgcgagcccctgcgagacgccgccgccggtccgcatcaccgggacggcccgccggagcggccgagccgtcccggtaccggacgcgcctgcggacggtgcggcggccggcggtgcggaggccgacgcggcggagccctccatcgacctgctgcggcggctgctggccgagcgcgtggagctgccgcccgagatggtggccgacgacagcaggccgctggacgacctgcacctcagctcgatcaccgtcgggcaggtcgtgaaccaggcggtgcggctgcggggcctggcggtgacgcaggccccgaccaacttcgcgaccgccacgctccgcgagctggccgagacgctcgacacgctcgccgagaccgccctcccgggcgacctggagccgggttccgcggtcgcgggggccgccgcgtgggcgcgcgccttctccctcgacctcgacaccgaaccgctgcctcggcccgcgacgtccaccgccccctccctcgcggcgggcggcgccggcgggtggacggtccacgccaccgaagggcatccgctggccgggccgctccgcgacgcgctggagcgggcgggcgccggtcccggcgtcctggtctgcctgccccccgactgcaccgacgaccagctggaaccggccctggacggggtgcgggacgcgctggcgggcgcgccgggcacccggttcgtcctggtccaggacgggcgcggcgcggccgggctcgcccggaccctccgcctggaggcgccgcacctgcgcgtcacgatcgtgcacaccccgccgtccgcggacgccgtcgaccgggtcgtcgccgaggtggcggcgaccggggagttcgccgaggcgtactacggcgccgacggcgagcgccgcgtccccacgctgcgggcgatgcccgtgcgcgcggcgcgcggcgacccgccgctggactcctcggacgtgctgctggtgacgggcggcggcaaggggatcaccgcggagtgcgcgctcgccgtcgccgccgacaccggcgcccggctcgccgtgctcggccgctccgaccccgccgaggacgccgaactggcggcgaacctggcgcggatgtccgacgccggggcgaccgtccgctacgcccgcgccgacgtcgccgacccggtccgggtcgccgccgcggtcgcggagctgaccgagtcgctcggcccggtcaccggcgtcctgcacggggcgggacggaacgttccggccggtctcgccgggctggacatgccggagatccaccgcaccctcgcgcccaagacgggcgggctggaggcggtgctcgccgccgtcgaccccgcccggctgaagctgctcgtcacgttcggcagcatcatcggacgcgccgggctgcgcggggagggccactacgccaccgccaacgaccggctcgcgcagctgacccgcgagttcgccggccggcatccggactgccggacgctctgcatggagtggtcggtgtggtcgggcgtcggcatgggcgagcggctgtcggtggtcgagggcctcggccgcgagggcatcaccgccatcacccccgaccagggcgtcgagatcatgcggcggctcgtcgccgatccggacgccccgtccgtcgtggtgatcagcggccgcaccgggacgatcgacaccgtgcgccacgacgcgccggagctgccgctgctgcggttcacggggcggccgctcgtccggtaccacggcgtcgagctggtcgccgagaccgagctcaacgtcggctccgacccgtacctggccgaccacctgctggacgggaacctgctgttcccggccgtcctcgggatggaggcgatggcccaggcggcgtccgccgccaccggccgggaggagccgcccgccttcgagggggcggagttcctgcggccgatcgtcgtcccgcccgagggcagcaccacgatccgcgtcgccgcgaccgtcgtcgacgacggcgcggtccaggtcgcgatccgcacggccgacaccgacttcgccgccgaccacttcaccgcgcggctggtgtacccggacggaccgctcccggacggccccccggaccaggtcggcgacggcctgcccgaggtcccgctcgacccggccgcggacctgtacggcggcgtcctgttccagggcgcccgcttccagcggctgcgccggtaccaccgggccgcggcccggcacgtggacgccgacgtcgccgcggtccccgccgggggctggttcgccgggttcctgcccggcggcatgctgctggccgaccccggcatgcgggacgcgctgatgcacggcaaccaggtgtgcgtcccggacgcgaccctgctgccgtccggcgtcgaacggctgcggcccgcgggtcccggcgtcgtcggcgacctgcggtactgcgccaccgaacgggagcgggacggcgacacgtacgtgtacgacatcgccgtccgggacgcgaccggcgccgtcgtcgaacggtgggacgggctgcgcctccaggccgtccggaagggggacgggcgcgggccgtgggtgcccccgctgctcggctcgtacctggaacgtgaactggaggacctcctcggcgtgcacgtcgcggtcgccgtggagcccgacccgcccgccgaggcgaacggggggcggggcgaccggacggctgcggccgccgcccgcgcgagcggcggcgcggtgtccgtgcggcgccgcccggacggccgtcccgaactgggcgacggccggccggtctccgcctcgcacggttcgggcgtcaccctctgcgtcgtcgcggacgagcccggcgcgggcccgctcggctgcgacgtcgagacggtcgcggagcgggccccggcggactgggccgggctgctcggcgacgccgccgcgctggcgaaggtgatcgccgcggagcgcgacgagcggtacgcgaccgccgccacccgagtctgggcggcgatcgagagcgtccgcaaggcgggcctgccggccgacgccccgctgaccctcgcgccggccggcgccgggccgtgggtggtcgtggcctccggcggcctgcggatcgcgaccctcgtcaccgccctgcgggacgagccggacccggtcgtgctcgcggtactcgtggaaggacggtcgtaaccgcatggacaaccattacgaataccggcacacggtcggtttcgaggagaccaacatcgtcggcaacgtctactacgtcaactatctgagctggcaggggcgctgccgggagatgttcctcaaggaacgcgcccccgacgtgctcgccgagatccaggacgacctgaagctgttcacgctgaaggtgagctgcgagttcttcgccgagatcacggcgttcgacgagctgtccatccggatgcacctgctggaactggcgcagacgcagctggagttcggcttcgagtacgtgcggctcgacccgggcgggctggagaccctgatcgcccggggccgccagcgggtggcctgcatgcgcggccccaacacccggacggcaccggcgcgggtccccgacgcgctggtcagcgcgctgcgtccgtacaccagggaggcgccgagcccggcggggagggcgtcatgagcgtcgatcccggtcagtccccgggcgagggcggcgcggacatgacggccaccgacctgcgccgggccttcgggacgttcgccacgggcgtcaccgtggtcaccgtcggcggccgcgagccgcacggcatgaccgcgaactccttcacctcggtctcgctcgacccgccgctggtgctggtctgcgtcgggcgcagcgcggtcatgcaccagcggctggccgtcggctccttcggcatctcggtgctgggggccgggcaggagtcggtggcgcggtacttcgcggacctgtcccgcccgctgggcgcggcccagttcgaccggatcggctgcacgccgggccgggccaccggggcgccgctgatcgacggcgcgctcgcgcactacgaatgcgagctgtggagcaccgccgaggcgggggaccacacgatcttcgtcgggcggctgctgacggtgcaccgcgccgagccggggcccggcgaggggctgctgttctaccagggccgcttccggcggctggagcccggacggagcgaggtgaaggcgtgagcatcgacgagctggacgcccgcggcgggacgccgcgggccgccggccgggtcccgcccggaccgccccgccgcgcgacgccgaacctgctgcggatgctggcgaccgaccggctcggcatgatgcaggcggccctccggcacggcgacgccgtccgggtcgggctcgggcccaaggccctgtacctgttcaaccgtcccgagcacgccaagcacgtcctggcggacaacagcgggaactaccacaagggcatcggcctggtgcaggcccggcgcgccctcggtgacgggctcctgaccagcgagggcgacctgtggcgcgagcagcgcagggtcgtccagcccgcgttccagcacaagcggatcgccgggctggccgacgcggtcgtcgaggaggcgggcgcgctggtcgcccggctccgggcccgcgcgggcggccccccggtcgacgtggtgggggagatgaccgcgctgaccctcggggtgctcggacgcaccctgctggacgccgacctgaccgcgcacacctccctgggacgggcgttcgagaccgtccaggaccaggcgatgttcgagatggtgagccagggcatggtcccgatgtggctcccgctgcccggccagctccgcttccgccgggcccgccgggagctggaccgcatcgtccgcgccctggtggccgagcgcctccgcgagggcggcggcgccgaggacgcgctgtcccggctgatcgagtcggcgcggcgggaaccggacggccgggtcgggcggcggcggctgcgcgacgagctcgtcacgctgctgctggccgggcacgagacgaccgcgagcacgctcggctggacgttccacctgctcgaccggcacccgctggtgcgggcccgggtgcgcgcggaggcacgggcggtcttcggcgacgggacgcccaccctggacgacctctccgcgctgtcgtacaccacgatggtcgtgcaggaggtcatgcggatgtacccgcccgtgtggatcctcacgcgggtggcgcagcgggacgacgaggtcggcgggtaccgcgtcccggcgggcgccgacgtgctcgtctgcccctacacgttgcaccgtaacccggatttctgggaatggcccgatgtgttcgaccccgatcgcttcggtcccgggcgctccgagggccggccgcgctacgcctacatcccgttcggggccggtccgcgcttctgcgtcggcaaccacctcggcatgatggaggccgtcttcgtgacggccatggtggcgcgcgacctgcggctgaccggggtgcccggccgcgacgccgtgcccgagccgatgctgtccctgcgggtgcgcgggggcctgccgatgacggtgcacgacgacgccggcgccggcgcctagccgcgtgcccggccgcgccgtgacgcgcatcgagaaagggcgtcccggaccgtgcgaggtccgggacgcccttcgcgtccgcgcgtcagcccgccgcggcgtgcagcgccgtgcgccgcgcgtcgagcagggcgagcagcacggggggatccagcgtctgcatcggccgcagccgcacctccaccagccggacgaccggttccccgtgcatcgtgatgggcccgtgcgctccgacgatcgggggcaggtcgccgaggacctcctcgtagcccggccggacggactgggcgagcaggtaccagcagccgtcgggaacgttctccagcttgaagcggcccggccgggggagcaccgtgcagcggaccggattcccctgcgggatggtgtcgggaaacagccccagaaagaccgggccggtttcgtcgtccgacggcggcggcactatctccccgtgcaccacgctggcgttgcgcccttttgccgggggcgcgtcggtgatgtgcggcgcgtagcccgtcaactcgcgataggcgctgggcgaaaggcccacgctgctcttgaaacgggaactgaaggtgccgacgctggtgtatccgacgcggtggctgatctcggtgacgctgagttccgtggtgagcagcagccgtttcgcctcctgcaggcggactgcggagaggaatcttcctggtgagacgccggtcgctcgctggaagagtcgggtaaagtggaatttactgaacatcgcggtgcgggccatgtcgtcgatcgtgatcttctccccgatattgtgatgaatggtttcgatgacccgcttaatgctgtccgtcgtgcgcgcgtccatacatcacccctcgaatgccgtgaacttgcacccggtcgacccgaataggtccggtgcgggtagatcgttccttcccctcggaaaggatacatggccgcgcgcggaatgggattgcaccgggttgaacgattcctcggcgaaaggagtgggccggcgaccggtaataccggccgccggcccaggaatatgggtccgcgttttatggaggtaaggtgcctgctcgaggcgggatatgtgcagaattcatatgcggtccgtctcagggcggtgactctgcgcggcgctccagcaattgcgccatctgctcccagttgcgggcgcagtgccgggcgacggcggcggccgtctccgcgcagtgcggggggaccgagacgatgagggcgctccagtcccggggggtcgccatgcgcgagtgcaggagccgcagcagctggcgtccgggctcggtctgccgcagcgccgggtcccgggcgagcttctggagcatgaggatggggtcctcggcgggaggagtgcgcaggtcgccatcgttgcggacggtcctgacggggggtgtcgcgggccgggcgccggacggcaccgggtcctccccgcggtgcagccgccggcggacgtcgtgcgccgtgcccagcgagacgtcggcgatcctggcgatctcccggagcgaggcgtcgggccaccgggtcatcgcctccgccgcccgccgccgaccctcgtgatggtccagtggccgcatgcggccgtccagcccccggcgtttgttcaagtgcggcgattcgtcggtcgagcgcttccgcaactgggcgacggtccgcgtggacagcccggtgttggcggcgatcgcgcggtccgaaaggtcgttccaggtgtcgatgatgcgcagcgccgcggccttgcgctcggcgagcgacaacggcagcccgtgcgcgatgttctcctgcacggcccggaggaaggcgctgtcgtcgctgccgtcgaaaaaaatcacgtcgatctcgcgcttaccctgtaaaagggcggccttcaggcgatgcatgccgtcgatgacgcgcatactcgggtaatggaccaggatgggtggaagcttcgagtcggtttgggcgagccgatgtatgtgttccgggtcctcggcgcgccgtggcgagattccgggcaggagttcgtcgacgagtacggtattaacgggcggcagagcaggcgaatttgattcggttcccgtctcgccggtgtccgtcgggggtgcctctcgggggggttccgtgtcactcatcatgctgccatccccgtatgcatgaaagtccgattcggtccggaggcaacgaatccatggctggcctcgaaactggacggtccaatggaaagatacctgaggatctgagccgcgcaacacttgatcaagtacagatcaccctccacttcgtagtcgccgtgctacgtgttgtgcacccgccctgctcaccggtcgcggtgttgtgcgcgcggggcgattgaacgcgcaccgttcgaaagcttcggccccgtccgcggtgacacttcactgtcgtttgcttgacatgccctcgaccgatggtatatgtccccgttatctcggccgtcgccaatccgttgttgatagttgcgctgccgccggcatgctcggagatgccgggcccgattgcgcgtctcgacgatgggtcatgcgggagcgggcgcaccaatggtctttagcgataaggcgctcgacgggcttccgcgtgaaccgatggaggtgacgccggtgggtacggctgctgtggaggacgagcgcgccaggagaatgaccctcgaggccttcgccgacaccatgatccccggagagcggcggttccccggggacaggacggtggcgggcgccgcaccgggccccggcgcggtcgccgcgggcgcggtggaactgctggagacgccggcggccggcatcgtccacgacctgcccgagctggtcgcgatgctggacgagcacgcgcgcggccacgccgggcggcagggcctggccctggacccggacgtgcccgcgttcgtcgccctgccgttcgccgaacggaccgcgctggcgcaggcgctgctggcccccggccatccggagaacgaggcgtggatcctggtcgcgctgttctgcgtcatggccttcgacaccggcgcgcacctgcacacgctggacgcgatcgcccaggggcatcccggcctggcccacatggggctggagagtcccgactccgacgggttgtggcgtttccccacctattcctacggccgccgcctggccgacatacacccggacacgacctcctcggggagcccgcgatgaccgcaacggagagcaccgacgtcctgatcatcggcagcgggttcggcggcgcgatcgccgcctaccacctggccgccggcggtgccgacgtcgtcgtgctggaacgcggcccgtggctggagggcgacgacttcgagcacgacttcaagctcggctcgtcctacacccggatcttcgacttcgtcgtcggcgacggcatgagcgtgctcggcggcaactgcgtcgggggcggcagcgtcgtgtacttcgcggcgatgccgcgcgcgccgcggttcatcttcgagcggcgcggcggcatcggccgccggatgtggccggagagcgtctccagggacgcgctggaaccgtggtacgaccgggtggaggaggcgctgccggtcgtcaagcagtcctgggacgaggtcacctacgcgggcgggctctgggcggcggcgtgcgaccacgcgggccgcaccgcgaaccccgtgccggtcgccgtggacaactccaagtgcgtcaactgcaactggatgatggccgggtgcaagttcgacgccaagcggtcgctgctgttcaactacctgcccgcggccgtggcggagggcgccgagatccggccgctgcacgaggtccagcggctcacccgcaacgccgacggcggctaccgcgtccactacaacgtcatcgacggcgaggactaccgggtgcacaccgggaacgggaccatcgacgccaagatcgtggtcctggccgccggcagcgcggcgacgccggtgatcctccagcgctccgaggacgacctcgggcggatgccgcacgcggtgggccgctacttctccggcaacggcgagcggctgaacaccgcggtcgtcaacgaggacaaggtgcgggaggtgctcggcctgtcgcgccccgacggccgcgcctacgccgccaaccagatcggccgcgggccggtcgtggcgagctgggaccggctcgacggaagcctgcccgagtactcgcgcttctcgctggagcagctctacttcccgcccggcctgggcaccatcctcgcccaggtcccggacgccgccgggcccacctggttcggcgcggagaagaaggagatgctgcggaactggcagtcgtggctgaccatcttcaccatctccgaggacgacaacgagggggtcttcgggccgccgccggcgaccggcaacgccatgcgcatctcgcagcagatgctcggccgcggcaacctgcactaccggccgacgctgaacaccatgcgcgggtgggccgagtccgacgccgccgtccgggacatcctcgaacgcgacgggctggccgaggtgcggccgtggacgaacgacctggtcggcgcgtacaccgtgcatccgctcgcgtcctgccggatcggcgacgaccccgcgacctcggcgctggacgaccggcacgagctgcgggggcaccccgggatcttcgtcaccgacggctcggcggtgccctgcggcctgaccgtcaacccggcgatgaccatcgccgcgctggcggagcgggccatgcccgcgatcgtgcgcgcggcgcgggaccggggcgtcgaggtcgggtacggggcgcccgcgcccgacggctcgacggccggccgccgggccacgctgccgctggcgcccgcggtgggcggggaccgatgacgcggcggcggcgatgaccggtatcccggcccgggcggcgcggacacgcgcgcaggggcagatccgatacgtcacccccgtgccgtacgcggcggcacgggggacggtggctcgggtctacgcgcaggtcgaacgcgacttcggcctgctggcgccgcccgtggccctgcacgccgcggtcccggaggtgctcgcggcggcctggacgatgctgcgggagaccctcgtcgcctcgggggcggccgaccggacgaccaaggaggccgtcgccaccgccgtctccctcgccaacacctgcccgtactgcgtcgaggtgcacggggtgaccatgcggggcctggcggcggacgacgccgccggcctgatcgccgcggaccggatcggggagatcgccgatccggggctgcgggcggtcgccgagtgggcgcgccggaccgggacgccggaggccggtgcgccgccgtccgggtccccggcgggggagctcgtcggcgtggccgtcaccttccagtacctcaaccgcatggtgaacgtgttcctcccggactcgccgctgcccgcgaacctgccggaccccgcgcgcggggccgcccggcggctggcggcccggatcatgcggtcgggggcccgcacgcaccgggcccccggcgggtccgccggcctcctgccgcccgcaccgccgccggacgacctggcgtgggcggccggtgcgccggacgtcgcggacgccttcgcgcgggccgccgccgcggtcgaggaggcgggccgccggtggctgccgggccccgtgcgggacgtcgtgtcggccgccctggacgagtgggacgggcgtccgccggggccgagccgggcgtggaccggcccgctcgtccgggacctgccggagtccgcgcgtccggcggcccggctcgcgctgctgacggcgatggcctcctaccaggtggacgcgccggtcgtcgacgcctaccggcgggccgagccggtgcgggacgggtcgcgggacgggtcgcgggacgcggcgctgatcgccctgaccgcgtgggcggcgttcgcggccgcccgccggacgggcgcccggtcggcacgccgggagaagcccgccgggacctgaacgatgcagtcttgacccaccggagaattgcgcacggccgatcggtgaatcggcgctggaaagggagttgtcgtatgtcggagtcgcggaacgtgttcgacgacctggccgccgaggccgacgtcatcgatcggctggtcgcggaaattcacgaatcggactggcgggccgagtcgcccgctcccggatggacggtgttcgaccagctcgcccatctcacgttcatcttccggctcgccggaacggccgccgccgacgcggcgaagttccagaagatgatcgagggggcggaggccgacttcaacggcgcggtgaacgccgcgctggccgaattcaagggcgactcgccggcggaactgctgcggaaatggcgggaggcgcgggacttcgcggtgcccgcgctggcggcggtgcccggcgaccaggtggtgccgtggctggtccggccgctgcccgcggcgatcctcgcctgcgcggggatcatggagtgcttcgggcacggccaggacatcgccgacacgctgggcgtccgccgcgagcccaccgaccggctcgtccacctggtgggcttcgcgatcctcgtccaggagttcggctaccagtcccggggcctgacccagccggacgtcgagttccgcttcgagatcacggccccgtcgggcgagctgtgggcgttcggcccggaggactcgccggagcggatcaccgggtccgcgctcgacttctgcatgctggtgacgcggcgccggcaccgcgcggacctcgacgtggtcgcgaccggcgcggaggccgagcgctggctcgacatcgcgcaggcgtaccggggcccggcgggcgaggggcgccggccggggcagttcgccgcggcgcggggctgagggcgcggcggtcatgaccggaccggcggttcccgacgtcaagcacgtgcccgtcgaccgggcgacccgcgagtacctcctgcgctcgtgctcgccggccgacccggtggtgcgcgacctggccgcgcgcacggccgaggtcggcgacgccgcgggcatgatggtgccggtcgagcaggccgccctgctcaccctgctgaccaggctggtgtccgccgccgtggtcgtggacgtggggaccttcaccggactgtcggccctggccttcgcccgcggcctggcgcccggcggcaccgtcgtcacctgcgacgtgaccgacgagtggctggacgtcgcgcgcgagcactggcggcgcgccggggtcgccgaccgcatcgagttccggctcggcgcggcggcgcggacgctgaccgacctcgccgccggcccggcggccgacctggtcttcctcgacgccgacaagatgaactacccccgctacctcgggctggcggtgccgctgctgcggccgggcgggctgctggtggccgacaacgtcctgctggacggctcggtcctcgaccccgcgcgggcacccgccgggctgccgcgccgcgcggcggagcggatgcgcgagttcaacgccgcgctcgccgcggacgaccggctggaggccgtcatgctgcccatcgcggacgggatgacggtcgcccggaaacggtgagcgtgcacgcgcgacgcggccccggcgctctcggcgccggggccgcgtcctgagcgtggccggtcagtcgcccgcgccggccgcgacgccctcggcaccgcgggccgcgaggacctcccgggtgaacgcggccagatcggggtcctcgaacagcacgcccacgtccaccacgatgcccaggtcgtcctcgatgcggccggtgatgcggaccgccgagatcgattgcccgcgcaactggaagaaagtgccatcgcaggtgccgtccggcatgccgagaacgtcctgccagatttccgccacgcgcttttcgatcagcgccgtcgacgaatcgtgtgagtctctttcgggcatgcgatgccgtccctcctgaaagcggttcgaattctcgcccgcccggtgggccggcgaggtgcgtcccgccccatcgtcggaggagatcaggcccgtcgcttcctgtcgattgcggtttcgatttccccggttccgggatatccgcgcgccgcactcagcgagaagcggacggccgcggcggcgtgtgactattcgatcgcgatggagacgaatatgactgcgatcggaacggccccgcacgatgccggggccgcctccggcgtccaggccggtttccggttcctggaccgcatggccccggacgggacggcgcaccggatccgccgcgcgtacgaggtgcgcgggccgctcgacgtgcccgccctccgcgacgcgtggacggcgacgctggaccggcacgaactgctgcgcaccgccatcggggaggacgacgacggacggccggtgccgctgccggtcgccgacccggccgcctcgttcgtccgggacgggcgtccccggcacgccggcggggcgcccgccacgctgacggtgacgagccgggcgccggactcccaccgtctcctgctggacctgcacccggcctgcgccgacgaacggtcggtcgcgatcgtcctggcggagctgtcgtaccgctacgcccgcgcggtcggagccgagccgggcgacgcgccgccggaaccccgcgcccggtacctcgaccacgccgcccggagccgcgcggccgaggccgcgcccgcgttccggcgctcgctggcctggtgggcggcggcgctgacaccgccgcccgaacccccggacctgcccgccgacggggcccgctcgggcgtcgccgcggaccgcgcgtccgtgccgttcacctggacggacggcgtcgcggagccgctcgcgcggctgtgcgaacgcgagcgggtgcggccggacgccgtgctgctcgcggccctgcacgccctgctccaccggtacggcggcgcggcgcggacggcggtcggcgtcccgtgcccggtgcgcccggccggatccgccggcgtcgtcggccccttcgagaacctgctggtccacgtcgcggactccaccggtgacccgtccttccgcgagctggtccggcggacggcgcgcaccctgcgggcggcccgcgagcaccgcgcggtgccgttcgaccggatcgtccggaccgtggacgttccgcgcgccccggaccgcctccccctgtgcgacgtcctgttccggtacgcggaggacgagccgtccgggctccggctccccggtgccgaggtgcgcccgtccgaggccgccgccccggccgtcgccgcactctccctgagcatcgagggcgcctccgcgtcccgcgtggcgggcaccctcggataccggaccgacatgttcgggcgcgaggccgcggagggcgtcctcacccagctccgcacgctactggccgccgcgctcaccgcccccgaaacccccgcggacgccctccccctgaccccaccgaccacggacacgtcggacctgaccacgcgggtggaggcggacccgccggacgcgcccccttcgacccactcggcccccccgaccctgccgggcgcggacccgtcggctgcgacggatccgtcggacgcgggctcctcggccctgccgggcgcggacctgtcggacctgtcggacacggcgtccggcgcggtgcccggcacggggacgggcgcagcgtccggtgcggggaccgtgcacgggatggtgttgcggagtgcggcgcgtgtgcccggggccgtcgccgtctcccatctcggcgaggagctgacctacgcggagctggagcgcgagtcgtcccggatcgccgcgtacctgcgcggcatcggggcggagggcgcgcccgtggcgatccgggcgcccgccgggacgcgccggatctcggcgtcgctcggtgcgctgcgcgccggggcgcacctggtctggttcggccccggggacgtgggggagcgggggcggcaggtcctcaccgagctgcgtccggcatgcctcctgctggacggcgacccggagcaggacccgctcggccgctggtaccgcgacgagctgggcggccggacggtcggcgtgtccgccgcgggccgcgaaccggacccgctccccccggacggccccgcggggcccggcaccacggtgtacgtcgcccacacctcgggttcgacgggacgcccgaagggcgtcgcccacacgcacgcgtcgttcgcccagttcctcacctggatggcggacgcgctcgacatcgggcccggcacgcggctggcgcagtgggcggcccccgagcacgacccgagcctgtgcgaggtgttcgcgacgctcgccgcgggcgggacgctgtgcccggtgccggaccggatccgggctcaccccgaacgcctcgtcgactggctggtcgcggagcggatcacgttcctccaggtcatccccggtctcgcccgggagctgctgaaggagctgcggcggcgcggcgggacggagcggctcgcggcgctggaccgcctggtgctcatgggcgaggcgctgcccggcgagctggccgacgcgctgcgcgacgcgctgcccggcgcccggctcgccaacgtctacggccccaccgagacgatcgcggcgacctggtacgacatcacgggaccggtcgcgggcacggtgccgatcgggcggccgatccccggccgtcaggtcctggtactggacggcgcggaccggccgtgccccaccggagtgaccggcgaactcgtcatccgcagcccgtacgccgccgccggatacgtcggcgggatcggtgacgaggcgttccgtccggtgcccggcctggacgacccgcccggtgcgggcggtcccgtgcgctgctaccgcaccggcgacctcgcgcgccgccgctgggacggcctgctggagttccgggggcggcgcgaccaccaggtcaagctgtccggcgtccggctggagctcgccgagatcgaggccgtgctcgccgcacaggactcggtcgccgagtgcgcggtcgtcccggtcgtcgacggggacggcctggtgagccggctcgtcgcctacgtcgtgcccggcccggacggggacgcgggcggggcgaccgaatggcgggcccggctgcgcggccgcttcggcgcgtcggtgcggctggtgtccttcgagaccctccggggcccgctgccgcgcaacgccgcgggcaagatcgaccggcgccggctgcccgtgcccggaccggtcgccgtcccggcacgggcgcccaagggagccgtcgagggagccctggccgacatctggcggcggctgctggacgtcgagcacgtcgacgccggcacgtcgttcttcgcggcgggtggccactcgctgctgctagcccggctcgccagccggatccgaaggcgcttcggggtggagatcccgctcctcgagtgcctcgcacaccccacgttggccggaatgtccgcgctgatcgaggcatcgggcggagcggacgccgggacgtggacacaccagcgggcagacgtcgacgccgagaccggcactgtccccgagcgatcggagtgaaggtgactcagaccgagattcgaatgccggttgacatcaacggcgaggacatggacatcgacgggctccggcaggtggccgagcagcggatcccgtgccggctgacgccgacggtgctggacaaggccgccaagagccgagcgcagttcgagaccctcgtcacgcaggacgtccccgtctacggggtcaccaccggctacggcgagatgatctacatgctggtggaccgggccaacgaggtggaactgcagaccaacctggtgcgcagccacagcgccggggtcggccggccgttcgccgaggacgagtcgcgcgcgatcgtcgccgcccggctcaacgcgctggccaagggccactcggccgtccggcccgagatcctggagcggctcgcgctctacctcaacctgggcatcaccccggccatccccgagatcggctcgctgggcgccagcggcgacctggcgcccctgtcgcacctggcgtgcacgctcatcggcgagggccggatcctgcgggacggcgcggcggtggagaccgggccggagctgcgccggctgggcatcgagccgctggagctgcgcttcaaggagggcctcgcgctgatcaacggcacgtccgcgatgaccgggctgggggcgctggtcgtcggccgcgcgttcgagcagatccggcaggccgagatctgcaccgcgctggtcatcgaggcactgcgcgggtcgatgggcccgttccagccggaggggcacgacatcgcccgtccgcaccccgggcagatcgactcggcggccaacatgcgcgccctgctgcgcggcagcggcctgaccgtcgagcacgccgacctgcgccgcaccgtccaggagcgcaagcgggaggaggagagcgtccagcgcaccgacatctacatgcagaaggcgtactcgctgcgggcgatcccgcaggtgctcggcgccgtccgcgacacgctcggcagggccggcgagacggtcgaggtcgagctgaactccgccaccgacaacccgctgttcttcgagggccgggagatcttccacggcgccaacttccacggccagccggtcgcgttctccatggacttcacgacgatcgcgctgacccagctcggcgtcctgtcggagcggcgcctcaaccgcctgctcaaccggcacctcaactacggcctgccggagttcctggtcatgggcgagcccggcctcaacagcggcttcgcgggcgcgcagtacccggcgaccgcgctggtcgccgagaaccggacgatcggcccggccagcacgcagtccatcccgtccaacggcgacaaccaggacatcgtgagcatggggctgatcggcgcccgcaacgcgcgccgcgtcctgaacaacaaccacacgatcctggccctggagttcctcgccgccgcccaggcggtggacgtcgccggacgccgcgacgggctcggccccgcgggcgccgcgacgtacgagctcgtccggtcgatggcgccgaccctggaacgcgaccggtacatggccgacgagatcgaggccgtggccgacgcggtctcgcgcggggccttcctggaggcggcccgctccgcgggcgtcgagctgcgctgatggggcccgccgcacccggggaggagagcgagccgtgaacgaccggaccgacgacaccgaccgaggcgaacgaagcgaccggaccgacgagaacgaccggaccgacggaaggggctggaccgacgtgagcgagcggaccgagacgtacgaccggaccgaggagtacgacgtcgtggtggtcggcggcggcccctgcggctccaccgtgtcgacgctcgtcgcacggcagggccaccgggtgctggtgctggagaaggagagcttcccccgctaccagatcggcgagtcgctgctgccggcgaccgtccacggcatctgcaagctgctcggcgtgaccgaggagctcgagcgggcggcgttcaccgtcaagcgcggcgggacgttccgctggggcgccaacccggagccgtggacgttcgcgttcgccgtctcgtcccatttcgccggagacgccgcgaccgcctaccaggtggagcgcatgaccttcgacaagatcctgctcgacaacgcccgccgcaacggcgtggaggtgcgggagcgggtgtcggtcgtggacgtcgtcgaggaggacgaccgcgtggcgggggtccgctacgtcgacacgggcgggacccggcgcgaggtgcgcgcccggttcgtcgtcgacgcgtccggcaacaagagccgcatccacgaccgggtcggcggccgccgccactactcggagttcttccgcaacctggccctgttcggctacttcgagggcggcaagcggatgcccgcccccaacgagggcaacatcctcgcggtcgcgttcgacgcgggctggttctggtacatcccgctcggccccgacctcaccagcgtcggcgcggtggtgcagccggaggcgctcgaccggatccgcggcgaccgcgaggaggcgctgcgctcgctcatcgcggactgcccgatgatcgccgactacctgtccggcgcccgccgggtcaccgaggggccgtatggggagatccggacccgcaaggactactcctacatcaaggaggcgttctggaagccgggcatggtgctggcgggcgacgccgcctgcttcatcgacccggtcttctcctcgggcgtgcacctggcgacctacagcgccctgctggcggcccggtcgatcaacaccgtgctgcgcggcgacgccaccgaggccgactgcttcgcggagttcgaggaccggtaccggcgggagtacgcgcggttccacgacttcctcgtggccttctacgacatgcaccacgacgagaactcctacttctggaaggccaagaaggtgacccgcaacgccgcctccgacctggaggcgttcgtcgagctggtcggcggcggatcctcccaggagaacgcgctggtcgcggccgacgcctacgcctccgacgcgccgccgtccgaggagtcctactccgccgggcgccacgccgcgttccgcgagctgtcggacatcgtcgagcgtccggttgacgcggcgggggaggaccgcgacctgctggggtccgcgctggcccggtcggtctcccgggagggcacccggatacaggtgcaggccgccctcggcggcaacgccgacgagcacgtcccggtgcgtccgggaggtctggtcccgtccgcggacggcatgcactggagcgtcccggccgcacccgccgggacggcggactgagaagggagagcgtagccatgtccgacgtgacactgaggtccgcgcggccggagccgcggccggcggatccggacggcggcgcgggcgaccgcatcccgctgtcgctccagcaggagttcctgcgcatggtcgacaagggggacgaggcggggccgttcggcccgcagtacacgatcgtcggcggctggcgcgtcgagggcgggctggacgtgcccaccctgcgcgacgcgctgcacgacgtcgtcgtccggcacgaggcgctgcgcatgaccgtcgtccgggacggcgacgagcagcaccagcggctgtggcccgcgtccccgcccgacctccgcgtccgggacctgccggccgaccccgcgcaccgcgacgccgccgccgaaaagttcctcaacgaggtcgaggccgggctgttcgcggcggacgaacggccgctgatctgcgccgcgctcggccggttcgacgcgggcgacgcgatgctggtgctgctcgcgcaccacaccctggtcgacgggtggtccatccacgtggtcatgcgcgacctggccgtctgctacgcggcgcgccgggagggacgcgcgcccgagctgccgccggtgcgccagtaccgcgactacgtggcctggcagcgggcgaacgcggacgaacccggcgtggcgatctcccgcgagtactggcgggagacgctggacggggcccggctgctgccgctgcggaccgaccgcgcccgcggctcccgcggctccgacgccacgggctggtaccggttcctgctcgacgaggagttcgacccggcgctgcggcgggtcgccgccgagacgcgcagctcgccgttcatggtgctcctggccgcgtacctgctgtacctgcgggagcggaccggccggaccgacatcgtgctgccgaccttcatgcccggccgcggggagccctggagccacgagctcgtcgggttcttctacaacttcatcccgctgcgcaccgacatcgccggatgcaccgggttccgggacgtgatcgcccgggtccgggcgacctgcctgggcgcgtacgcgcacgaactgccgtccgtccagttcatggacgaggcacccgagctgatggactcggtgtcggatccgcgcaccgccgccgtggtgttccaggtgacgcagtccccgcacatgatgtacggggagcgcatcggcgacctgacctacaccgcggtccgccgccgggtcgtgtccgtgccggtcgggtcggagatcccggacggcgtcctgtgggggctggagacgcacccgtccggcggcatgatcggcagcatcggctacacgaccgagctgttcgacgagaagacggtggcgggaatggccgacgacttccggcgagtgctcgaggagaacctgctcgaccggtgacgcgcacgggacgagggccgcggcgaccgggccgcggccctcggcggtcgtgcggcggcgccgggccgcggagcgcccaccggccggccggccggtgggcgccgattcgtcccgcgtccgatcaattatcggacgaccaattccggggccgcaatcggaaagatgccggtcgacccctgcaatgcgacgatatgtggcaagtcagaatctgtgcgcgccgccacacaacagcaattccgctgtcgaatggaaggcgggccgggatggaaatggcgggtcggaacgcgccgatccggcgccctgccgtgcgcccttcccggtgaggttcgtcgacgcagggagaggatcgccgtgtacgcccaaattggagatcgcgtcattgtgctcggcgggagcctgaccgggctgttcgccgcgggggcgctcgccgagagctatcgcgaagtcgtgctggtggaccgggacgaactggtcggcgtgcgggaggcgcgtcgcggtgcgccccaggcccgccacatcaacgggctcctcgccgccggctcgcgggcgatggaggacctgttccccgagatcaccgcgcagatggtcacggccggctgcccgctcaccgacctggcgggcacggtccgctggtacttcaacggacgcgcgctggcgcaggcgcgggccgggctgaccaacgtggccgcccggcggccgatcatggaggcgcacgtccgggagcgggtccagggcttcgggaacgtcgtcttcatggagggctacgacatcctcggcctggtcacgtccacggacgggaccacggtgacgggcgcgcgggtgcagtcccgggccgagggggcggccgaggaggagctgaccgccgacctggtcatcgacgccaccggccgcggctcccgcacgccggtgtggctggagcagctcgggtacggccgggtcgaggaggagggcaccaagatcggcctcgggtacgggacgcggcactaccggccgcgccgcgaggtgttcggcaaggaccactcggtcgtctgcgtggcgtcggcggactccccccggggcgcgatctgcaccaagaccgacgacggcctgctggagctgacgacgtacggcatcctcggcgaccacccgccgctcgacccggagggcttcaccgccttcgtcaagacgctggcggctccggagatccacgaggcgatcatcgacgccgagccgctggacgacccggtgctgttccgcttccccaccacgatgcgccgccggtacgagcgcatgtcccggttcccggcgaacttcctggtgatgggggacgccatctgcacgcccaaccccgtgttcgcccaggcgcagacgctggcggcgctccaggccgtggccctgcgcaagcgggtccgcagcggggtgccgccggagtcgggcgagttcatgcgggtggcgggccgcatcgtcgatccggcctgggagctgaccgagggcatcaacctcaccttcccgggggtcgagggccgccgcaccggcaagctcaagttcatgcactcctacatgcggatgctgcagaccgcggcgacccgcgacgcctccatcaccgaggcgttcatgcgggcggcgggcctggtcgactcgccccagtcgctgatgcggccggggctggcatggagggtgctgcggggcgccggcgcctgatcggtcgtccgtggccggattaggccggttccggttcgggggacggcgatgagttccggccaccgggggcggtctatccggttgccgcgaggacggacgcggcccgacccgagaggatgtgtaccgatgacgaaccccgcccaacctcccaaggcagggaggcgggaatggatcgcgctggcagtgctctgcctgcccaccatgttggcggccgtggacatcaacatcatgttcctggccctgccgcacatcgccgaggacctggggtccggcggaacggcccagctgtggatgaccgacatctacggtttcatgatcgccggcttcctcatcaccatggggtccctcggtgaccgcatcgggcgacgcaagctgctgatggccgggtccgcggtgttcctcgtggcctcgctgttcgcggccttcgccacctcgaccgagatgctgatcatctcgcgcgcggtgctgggcgtcgccggcgccacgatcgcgccgtcggtactgggcctgctgcggcagatgttccaggatccgaagcagatgggcgccgccatggggctgtggggcacctcgatcatgctcggctccgtcctcggcccggtcgtcggcgggctgctgctcggcgccttctggtggggatcgatcttcatcatggcggtgccgatcacgggcctcctgctgctgaccggcttcttcctcctgccggagtcgaacaacccgaacgccccgaagctcgacctgatcagcgtcggcatgaccctggcgggcatcctgccgctgatctgggggctcaaggaggcggcccgggagggttggagcgccggttcgatcgccgcggtcgccatcggcgcggtgttcctggtggccttcgtccagcgccagcgcatggtcgagaacccgctgatggacctgagcctgttccgggtgcgcaccctgtcgatcgcgctcctgctggcgctgtcgatcgcgctcgtcatgggcggcctgggcctgatggcgacgcagttcatgcagatgatcctcgacctcagcgcgttccgggtgggggcgtggatgctgctgccggcgatcgcgctgttcatcatcggcaacatgggcacggccctggcccgcaagatccgtccggggatcgtgctggccgggggcgcgctggtcgccgccgtgggcatggtcgtcgtcgcccaggtgaccccgtcgtcgtcgctggcgctgctgctgatcggcatggcgatcgtgttcggcggcggcgggatgatcggcatcatgagcccgttcctggtgatgtcgtcggcgccccccgagaagggcggcgccgcggggtcgtactcgtcgaccgtcggcgagttcggtaccgcgctgggcgtcgcggtcatgggcctgatcggcaccgccgtgtaccgcggccagctcaccgtcccgtccggtgttccggaggaggcggccgaggtggcgcaggagagcatcagcggcgcggtgttcacgagcgaggcgatctccgacgcgcagggcaccgagctgctggcgtcggccgagagcgccttcaccgacagcttccacaccgtggcgtggatcgcggtggtgctgtacgtcggggtggccgccctggcggccttcggcctcaagcacgtccccgccaccggcgaccagccggcggaccccatgggggcgcagggcgtcgagcaggtgcccgacggagtgagctgatccggcggagcccttccgagtgacccgtccaggtgagccgatccgcgcggacgatccgcgcgggtcggctcacgcactccaccccgccaagcggcccgaccaacgcagctcggctcccagcccggcccgcgcgctcgggacggcgctcgtacgggtcggttcccggtccggcttgcgtggtcggcgctgtcctcgcgcggggcggggcgggcgcgtggccgggggcggttcgcgggtggagggggtgggcggtccgggctgtggcggggacgtcgaacgtgccgaaccccctccccgggcggagagggggttcggttcgttcagccgcccggcgcccggttggctacggggcgccggtcatgagagcgcggctaggagaccaccgtcgtggcgccgaccggggcctcgccgacgacggtgcactgcgcgccgttgtcgacctgggtggtggtggacggggtgaaggtgacggagccggccgaggtgaacgtgatctgggcctcgccgccgaccatgttcacgggctggccggcgggggtggcctcgttcgtcaggccgctcgcggtgatggtgccggactgggcaccgcccaccacgatcgccatgtcggtcacgacctccccggcggggaggtcctgcggggcgccggtggtcaccacggagctgacctcgaaggtggcggtgtcgcccacgccggccgtggccggcgcgtcgatggtcacggcgatgtccgacgggtagccgacgcagtcgtagttgaccgtgacggtgtccgccatggcgggcgcggcgcccgccgcggcgaacagtccggtggtcatggtggcggccgccgccagcagcgcggtccgcctgcccagtttgggcatttgcactcctcctggtgaggacggattctcatccgaaaatccgttcgattggggacatgagtcacgttaggtgcgcactcgtaaatgttgcttctttgagagtgctgcactcgccgcgggcgccgcgcacgctcggagttgcccgcttctcgcgcccccggcatcgtcgaatggcaggcgaattcgaatggccgccgcagaatcgccgatatggaggagctaaagtgacgatctcatccacccggccggtgggcgcgatgtccgccgcggaactggaagaactcgaccgccgccatctcgtgcacccgcaccagcggggcgcgtacccggggcgccgcgtcatcgtccgcggcgagggcagcacggtctgggacgccgccgggcgcgagctgctcgacgtgaccggcggcggcaactgggtcgcccaggtcgggcacggccgccgcgagctggccgacgccgccgcggcgcagatgacggagctgggctacttcaccgggttcttcgagttcgccaacgacaagtcgatccggctggccgagcggctggccgcgatggcgcccggcgatctcgaccgcgccttcctgaccagcggcggctcggaggccgtggacaccgccatcaagctggcccggctgcaccaccacaaccggggcgaggcggaccgcacctggatcatcgcccggcagtgggggtaccacggcgcgaccctcggcagcggtaccgcgaccggcttcccgcagatgcaggtgggcgtggggccggccctgccgcacgtcgagaaggtcaccccgccgatgccgttccacaccgagatgtacggcggccaggacccgaccgacttcctcgtcgacgagctggcgcggacgatcgaccgcatcggccccggcaacatcgccgcgatgatcggcgagccgatgctgggcggcggcggcgtggtcgccccgccggccgactactggccgcgggtccgcgcgctgctcgccgagcacggcatcctgctgatcgccgacgaggtgatcaccgcgttcggccggaccggtgtctggttcgactccgcccggcgcggcatggaccccgacatcgtcgtcctggccaagggcctgacgagcggctacgcgcccctcggcgcggtgctgatgcgggaggggatcgccgagaccgtggtcggcggggacgcctacctgcaccacgggcacacctactcgggccacccggtgtcctgcgccgtggcgctcacgaacctcgacctgctggagaaggagcggctgccggagcggtcggcggcgatcggcgaccggctgcgcgccgggctcgcgccggccggcgacctgcccgccgtcggcgagatccgggtggagggcgcgacggtcggcatcgaactggtcgccgaccgggcggcccgcgcgccgatgggccccgaaccggtcgaggccgtcctcgacgagctgtacaacgggcacggcctgatcgtccggaactacgggcccacgctcgtcctggcgccgccgctggtgctcaccgacgcggagacggaccgcgccacctcggcgatcgtggacgtcctgcggcggctggacgccgagaacgcccggatcgcgccgcgctgaaccccgacccgccgaatccgaccacagcgcagggatgcacatcatgaaggactcagcttcgccgaccgaggcgcccgcggacttcccgatcccgcggccctcgcggtgcccctaccggccctcggcctcccatgtcgaactcggcgcggacggtccgatgacgaaggtgcggttgtacaacggccgcacggcctggctggtgacgggcgccgccgaggcccgcgccgtcctctccgactaccgccgggtgtccatccgcccgtaccacggcaactacccgctgctgaacgaggagttcgagaaggtcgtcgacagcgggtacgccgacgtgctgttcggcgtggacccgcccgagcacacccggcagcggcagatgatcatgccgagcttcacgctgcgccggacggcgaccatgcgggccgacatccagcgcatcgtcgacgaccggctggacgagatggagcgcgggggcaggcagggcgacctcgtgtcgcagttcgcccagccggtgccgtcgatggtgatgagccggctgctcggcgtcccctactccgagcacgaggagttcgagaccccggcccacaagctgttcgtccccgaactggccgaggaggcgacggcggagctgggcgagtacctcgaccggctgatccgcaagaaggaggccgacccggacggcggcgagcgcggcctgctcgacgacctcatcgccgaccacctgcagaaggacgcgctctcccgggacgagctcgtccacatcgcgatggccatgctggtcgcgggcaccgacaccaccaccaacgtgatctcgctgggcacgctggcgctcctcgacaccccgggccagtgggacgcgctgcgcgacgacccggacctgaccgcggccgccgtcgaggagatcctgcgctacgtctcgctggtcgaggcgttcgcccgcgtcgcggtcgaggacatcgacctgggcggcgcgacgatccgcgcgggcgagggcatcctgatcagctgcgcgggggtcaacttcgaccccgccgtgatcgacgcgcccgacgcgttcgacatccgccgcccgccgcgtccgagcttctcgttcagccacggcatccaccgctgcccgggggacaacctggcccggctggagctggagatcgcgtttcggacgctcgtcacgcgcttcccgaacctgcgcgcgaccgtgcccacccccgaactgcgcagcaacaacaacgacggaacccttcagcggctctacgagctgccggtgacctggtagcggagggagcggaatgtcagcacacaccgaacggggcgccgcgcggaccgggccggagctgcgcggcgtcgcctacgacaccggtaccaacttcgccaccggtcagggcgacctctcgcggacgtcgtggagcggcccgcagatgcaggaggagatcgcggcgatcgccgaccagctcaactgcaactcgatcaccgtgtacggcagcgacatggaccggttgcgggagacggccgtcgcggcgctcgaccgggacctgcacgtgcggctccagccccgcctggtggaccgtccgcaggcggaggtcctggagcacctcgccgaggccgccgcgctcggcgagacgctgcgcgcggacggcggccgggtcgagctgacggtcggcgccgtgcacctgctgttcacccccggcatcgtccccggtgaccagtaccacgagcggatggccaacatctacgccgacgccgaccaccacctgctcaccccgaccgacacggtcgacacggcggccgcggcgccccggctcaacgagttcctggggcgggccgccacggtggcgcgcggcgcgttccacgggccggtcagctactcggccgcgcatttcgaggacgtcgactggacgccgttcgacctgatcggcctgatgtaccagtacctgccgaaggcccggacgcgcgcggggcacctcgacctgatcggcggctaccgcaggtggggcaagccgatcctcatcgccgagttcggcaccgcgacctaccgcggcgccgaggacaaggcgttcttcttctgggacatcgtcgaccgtgccggggagccgccggtgatcctgcccggccacgtccgggacgaggcggcccagtcggcctaccacctggagatgttcgacgtcttcgaggaggcgggcgtgcacggggtggcggtgtcggagttcatccacccgacccatccgcacaccaccgacgagaccctcgacctggacatggcgagcatggccatcgtgaagaccatccgcgacgacttcggcgacccggcctcgtcctaccgctgggagccgaaggagtcctaccacgccatcgccgactactacgcccacgtgggtttccaggccgccgcccgcgcggggtccgccgccggcgaggcgatcgggagccggtcatgaccgtttcggacgtgagcacctccgggcttccggagtacccgctcgccagggagtgcccgcaccgtccgggcctcgggaccgcgagcctccgcgagccggggccgatgacgaaggtgcggctgtacgacggccgcaccgcgtggctggtcaccggcgccgaggaggcgcggtcgctgctggccgaccagcggacctccgtgcgcccgcacccgaacttcccggtgctgaacgaggaactgacgcagatgcgggccacccgggagatggccgtcgaggaggagggcgggttcgcgtccgcgctgttcggcgtcgacccgcccgagcacagccgccagcggcaggtgctcgtcccgcagttcagcgccaagcgcgtggcccggcagcgtccgaacatccagcgcatcgtcgacgagcagctcgacgcgatggtgcggcagggcgccccggccgacttcatcaccgcgttcgccgagccggtgccgacgaaggtggtctgcgcccacctcggcgtcccgttctccgagcacgccgccttcggcgagttcgcgagcaagctgttcgacccggtggacgccgacgcggcgatggacgggctggtcgcctacctcgacgacctggtgcggcgcaaggagagcgagcccggtaccggcatgctcgacgcgctgatcgccgagcacgtccttccgggccgggtcgagcgcagcgagctggtgcagttcgccctggccgtgctggtcgccgggaccgtcaccaccaccagcaccatcgcgctgggcacgctggcgctgctggacgcccccggcgcgtacgcggcgctgcacgccgacccgagcctggcgcccggggcggtcgaggagatcctgcggtgggtgtcgctcgtcgagcagatctcgcgggtggcgctggaggacatcgagctgtccgggcggaccatcgaggcgggggacgggctcctcatcagcaccgccggcgccaactggggcccggacgtgacgacccaccccgaggagttcgacatcacgcggccccccgggcggcacctctccttcggccacgggatccaccactgcctcggccggaacctcgcgcggatggagctggaggtggtcttcgagacgctgacccggcgccttcccgggctgcggtcggtgatgccgaccgcggagatccccgcgcagcacgacgggaccgtgcagaagctcctctgcttccccgtcacctggtaaccggccggacgcgtcagcgggcctgcttgcccaggttcaggtagtgagtgcgctgcggcttgtcgagatgctcgatcgcgtagcgcagcatgatgcgcggtgcgccggcggcgtgctcgtcgaggaaggagagcaggcgggggcggtcctgcttgcccgcctcgcggagcattccgccgacggccttctgcaccaggtcctggtcgtcgtaggcgagaatttccgagatttcgaaagtgtcgtccaggtcgccgcggcggacgaagtacatggtgctgaacacggcgatgcgccgcgcccacaagttgtcggaccgggcgagttcgtacaggacgccgcgggggtccccggattcgtacaggtagccgccgatgacgtggtggctgctcaggtcgaccaggtcccaatggttgacccggtcgatgcggcgcaggtacagctcgtagagctccttgcggcgctccatggtgatcttcttgcgggtggcgtccttgcccatgatgctgagcgcgccgacgcgcacctcgtgcacctggtcctcgagcagcttctcgatctcggcgcagggcatcccgacgaattccttggccagcttgaagatgtcgcccatgcggacgccgttgaagacgtcgccctcggcgacctcgccggggcccgcccggaagtgccggaccaggtcgtcggtcgcccgatgggggttgagccgttccattctttccagaaacgcggctgcggtgagttcttccggcattgcgatcctcactgcgagaaggcatggtcccaggagaagtttagccgccggagtgccggcgaaaccgccggtcgggccggtctaatgcggcaatacggaagatgtgcgccggtggcggaacggaaagcatgtgggaagggagcgaatcctaggaggcacgatgcgggtcctgttcgtcgtctacccttcccacgcgcatctctggccggccgtgccgaccgcgtgggcattgcaaagtgccgggcacgaggtccgtgtcgccacccatgcgaatttcagcgcgtcggtcacggcggcgggactgacccccgtccagctcggtgacgccgacgcggtcgaggcgcgcatgcggcccgacgccaagccgcccgcgcggcccgaggaggtgctccacttcgcggacgtgctcgggctgaacgagcgggagcgcgagaactggatcccctactaccagtggctgctgaacccgatctcggactacgtccgcacggacctgcccgaggcgggcgacctcatcgacttcgcgtgcgcctggcggcccgacctgatcgtctgggaccccaccttcgcgtccggtcccgtggcggcacggctctgcggcgccgcgcacgcccgcatggtgctgggccccgactacctctcgtggagcttcgaccggctcgccgagcgccgcgacgcggtccgggccgcgggcctgcccgagagcccccagcacgagctgctgcgcccgctcgccgagaagcacggcgtcgagctcgacgacgagctgctgtacggccagtggtcgctggaccccatgccgccgggcatgcggctgccgacgagcgggatcacggtgccgatgcgctacgtgccgtacaacggcgccgagatcatgccgaagtggctgtacgagcggcccggccggccgcgggtcgcgctgacgctgggggagtccacccgccggttcatcaagggcgactggggccgcaccccgaagatcttcgaggcggtggccggcctcgacatcgaggtggtcgccacgctcaacgacctgcagatggaggggatcgatcggctgcccgacaacgtccgggcgatcgaatgggtgccgctgacccacctcctgcccacgtgcgacgtgatgatcaaccacggtggcatcgggacgaccgcggcggcctgggggctgcggacgccgcagatcgtctgcgacaccgacgacagcctgatgatgcgtcccgtcgaggtcgacccccggaccatggaggacggcacgtaccgcgtcggcttcgagttcggcgtgcgggaggaggtcgagatggtcaccacctgggagctgccgcccaagaagctggaggccggcccgacgtcggactacatcgtgtcgcgcggcgcgggcgcccggctggaccacacgaagctgtcggtcgccgaggtcgccgacgtgatcggctccgtggtggaggacccggcgtaccgcaagggcgcgcaggacgtgtacgacgagtggctcggcctcccgagcccggccggcatcgtgccgcagctggagcagctgacggcagagcaccggcggtgacccgggcccccgggcgcgaaccggccgcggggctgctggcggtgcccggcgccgatctctactacgagatccgcggcgccgggcccgccctgctgctgatccccacgggcaacggtgacgccggaccctacgcgccgctggcggacgcgctggccgaccgccacaccgtcatcacctacgaccggcgcggctactcccgcagcccgatgcacgccccggtcgacggcgcgcggcgcgtcgcggtcgacgcgcgcgacgcgagcctgctgatcgagcggctggccgccgggcccgccgccgcgctgggcggcagttccggcgccgtggtcgccctcgcgctgctggaacgccacccggacaccgtgcggacgctcgtcgcgcacgagccgccgctggcctcggtgctgccggacgcggccgaatggcgccggttctacgccgacctgtacgacacgtaccggcggatcggcgcgcgtccggcccgcgcggagttccgcgcccggatggggatgaccggggacacccggccgccggaggaggcgcagccgccgcccgcggagctggagcggatgctcggccggatccggggcaacctggaccgctggttcgaggaggaactccgcccctacccgtcctaccccctcgacacggcggcgctgggacgggtcgcgggccggctcgtcctggcgggcggccgcgactcgcgcgaccaccacccctacgagcccaacaccgtgctggcgaagcggttcggcctcgacatcgcggacttccccggcggccacgtcggctacgtgacccaccccttcgagttcgccgaacggctcgcggaggtgctcgccggggcccgctgaccggttcgacgcccggcccggtgaccgctcgtccggtcaccgggccgcggtcgtcagcgggtcggggcggtgacgaggtcgcggagcgccggcttgtcgggcttgccgacgggcgtgtgcgggagccggtccaggatctccaggcgctcggggatcttgaaggcggcgaggccgcgcgcggtgagcgctccggccacttccgccagcgtcagggcgtgcccggggtgcagccggacgaccaggcagacccgctcgccgacggccgggtccggcaccgcgaccgcggcggcctcggccacctgcggcagctcctggaccagggtctcgatctcgccggcggcgatcttctccccggcccggttgatcaggtccttgctgcgcccgcacaccacgacgttcccctcggcggtgatccgcaccaggtcgccggtgcggtaccagccgtccggggtgaacgactcgcggttctggacgggcgccccgaagtacccccgcggcgtgtacgggccgcgggtgagcagctcgccgatcgcgccggccgggacgggacggccgtcgtggtccacgacgagcagttcgtcgtgcgggctgacgggcgtcccctgcgtcgcgtgggcgatctcgtcgggggcgtccggccgcgtgtagcagatgaggccctcggccatgccgtagacctgctgcagccggcagcccagcgcggggccgatggtcgcggccacctcgggcgacagcatcgagccgccgacgtggacgtgccgcaggctggacaggtcgcgccgggtcgtcccggccgcctccgcccacgccagcgcgaccgccgggacggccgaggtcgtcgtcacgcgctccgcctcgatcgcggcgaagaccgcgtcggaccgcggcgagggcagcagcaccgcccgcccgccggacgacagcgccccgaacacccccgggctggccagcgggaagttgtgcccgaccggcagtaccgccaggtagacggtgccggggccgaaaccgcaggccgcggcgctgcaccgcatgttgtactcgtagtcgtcgtgcgtccggttgatgagcttgggcacgcccgtggtgccgcccgacagcaggaacagcgccacgtcgcccggatcgggcgcccgctcgtccagccagcgccgccgcccggcgacgtcgccgtcccgcaggatcagctcgtgcccggcgacgtccccggggtgcgggccgccgcccatgaccaccaccagcggcggctccggcagcgcggcggcgacccggtgcgcgagcgcccggtggtcgaagccgcgccaccggtcggggacgatcagcgccttggccgcgacgtgccgtccgatggaggtcagctcgtactcgcggtgcggcggcagcatcatgaccggcgcgacgccgagccggaagcaggccagcgccgtcacgacgaagtcccagcggttggggagctggacgaggacggtgtcgccgcgcccgaggccgcgctcggcgagcccgcgggcgagcgcgtcggcccggaccgccaggtcgcggaacgtcagccggacgtcgccgtcgaccacggcgacccggtcgccccagtcgtccgcccagcgccacatgtgctcgcccagcgggcggcccagccagcagcccgccgcccggtagcgggcggccgcctcggcgggccaggggatcatgtgcggaatgctggtcatgcgctcgcctcctcgacggcggacccggcggcgtcgaggccgtcggcgaggaactcggcgaccgcctcgacggtgggccggtcccagaacagggtcgcgggcagcggccggtgcaggccgcgctccagcccgcggcggatccggacggtcatcaccgagtcgacgcccatctcgaccagcggccggccggggtcgacgtcggacgcgccgagcccggtctccgcggcgacccggcgggtgatctcggcgtgcaggaagtcccgcagctccggcccgtgcagtcccgcccagggggccgccgcggccgcgaccccggcgtcggcgggctcggcgggcaggtcgtcgaacagcggcggccgccgccggccggggtccagcgggatcgtgcgcaggacggcggcgtacccgaggtcgtaccgttcggccagctcccacgcctggaacgcctcggcgcggctgatgtcggccgtgccgcgggcggccagctcctcgtcgatgacggcggacgaccgcgacatgccgaggccgcgccacgaggtccagccgaaactgatcgtcccggtgtcgccggcgttgcgccggtgggccgccagcccgtccaggaacgcgttgctcgccgcgtaggcgccctggccgggcagcccgaggagctgcccgcaggaggagaacagcacgaagaagtccggttcgcccggcgggaacagcgagtgcagcaccagcgcgccgccgatcttgggccgctggacggcgcgcagcgactcgccgtccaggtcgcgcagcagccggttgtcgaccaccccggcggcgtgcacgacgccgcggatgggcggcagccccagcgcggcgggcgacagcagcttgcccgccgtctccgcgtccgcgacgtccaccgtgacgacgaccacggtgacgccgagccgctccagcgaccggatcgcccgcacccgcgccacgtcggccgggtcggtgagctcgtcccaggagtcgcggggcggcagcgtccggcgtccggccagcaccaggcgccgggcgccgcgggccgccagccactgcgcgacctccaggccgaggacgccgagcccgccggtgatcaggtaggtgccgtcgggccggcagctgatcggcgcgcggacggggtcgccctccgggaaccgcagccgcggcaccaggaggccgccgtcgcggaccgcgacgacgtcctcgccgccggtcccgcgcagcacgtcgaggaccgcgggcacgtccgggacgccgtcgacgtcgatgacgccgccccacaggtcggggtgctccgcgccgatgatccgcgccagcccccacagcggcgcgtggccgagcggggccgggccggcgcactcccggacgccctgggtgacgcaccacagccgggacgcgcggccggtgcccgccgcgagcgtccggaccgtgcgcgccagcaggcgggtcgcggcgcccgcgtcctgctccacccggccgggacggccgggccgcggcaccaccagcacctcgccgggcggctccccggcggcgtcccggagcccgctcggcgaggacgccacccggtgcggcgtcccggtccgggcgagcccctcggcgagcgcgtcgcgcagggcgctgcgcgggcccaccagcaccacgccggacggcgcggcggtgcggtccgcggcgccgtcgggcgcccgccaggtgatctcgtggacgagccggcgcgggttggcgaccgccccggcctccccgtccagctcgccgtagcgcagcccggtcagcgtgcccagcgtcccgccctcgggggcgaggatctccacgtccaccgtgttctcgccggtcacccggatcacgaggtcggcccggacgggcggggcttgcggcagcgacagccggtggagccgcgcgggcatccgcagggtcgggggatcggggagcgcgacggatccggccgacatcgcggcgtccaggatcggcgcccacgtcgccttcgccgggtcgcccggacccgccgcgtcccccgcccgcacggtgagggccaggacgccctcgcccgcccggatccgctccaccgtccaggggaagcccatgcccgcgacgccgagcgcgccgagccggtcgaccacgtggctcgggggcagcggggtgcccgccgcgaccggcccgccgtccggcgccgggtcggagtgcggttcgacggccgccgtcgtgtgggtgacccagcccttgtcgtccgggtcgccgtcggccatccgggacgacagccgcagcgtgccgtcctggaggacgacctggacgtcgcggggacgggtcaggctgaccggcacccgcagcgccacgtcggccaggtccgaccacccggccgtcgccgccgccgcggtcaggaaggtggtcagcagcaccgccgccgggacgatctccacctcgcggaccgggtgctcgcccgggtaggggcgggacgtccggtcgacccgggtgagccaggcgtgcgcgggggtggtgccgttcatcctggtccggccgccgagcagcgtgtgcccggcgggatcgtgccgtccggtgaccggcgtcccgccctcgggggccgccgcccagtacggccggtgccgccagggcgtcgcgggcaggtcggcgggtgcgccgccgggccagcacgcggaccagtccacctccgcgccgtggcagctcagcagccccagattggcgagcagggccgcgcgttcgggccgcgcgcggcgcagcgtgtgggccacgaggtggtccgtgacgccgtgcgcgtcgagcgtctcgacgatggagtgctccaccaccggatgcggggagacctccaggaacaccgtgtacccgtcctcggcggcggccgccacggcggcggcgaaccggacgggggcgcgcaggttcgcggcccagtacgcgccgtcccggggcgcgtcgtccctggggtcgtccagcgcggtcgtgtagagcgggatccggggcgtacgggggcgcaggtcggacgccgcggcggccagcggggcgcacagcgggtcggcctgcgggctgtggaacgcgacatcggagtccaccggacggatccgcaccccctgcgcgccccactgctcggtgagctcccgcatcgcggcggcgccaccggacaggacggccgagccgggggacgcggcgacggcgacggcgacgtcgcggcggccggcgaggcggcgttcggcctcctccggcggcagcgcgaccatcgccatcgcgccgcgcccctccagccggcgcagcagcaccgaccggcggcagacgagcgcggcgccctcctccagggagagcaccccggtggtcacggccgcggcgatctccccgaccgagtggccgatgacggcgcccggacgcaccccgtgcgcccgccacaccgccgcgagcgccacctgcatcgcgaagatcatcggctgcacgaccgaggtgggccgcggggcgtcgtccagcagcacggcccgcggcgacacgtccagctcggcgcggaagaccggttcgagccgctcgatgacctcggcgaacaccggctcctcggcgagcagctcgcgccccatgccggtccactgcgagccctgcccggagaacacccagaccggaccgcgctcggcgcccggcagcaccgacccggtcgggaccgcggcggtgccggcgtcctgcccgcccgcggcgagctcccggagccgttcgaccagctcggcgcggttcccggcgacgaccacggcgcggtggggcagccgggggcggcggcgggccagcgtgaacccggtgtcggccgtgccgggggcgccgggccgcgacagccggtcggccagccgtccggcgtgccgggcgagcgcggccggatcggcggccgacagggggtagaccgcgaggcgggcgtccgccgcgccggtctcgccggtgccgccggcgtcggcggcgtcggccgggacgggcgggtccccggcctccagcaggaggtgcgcgatcgtgccgccgtagccgtagcccgagacgcccgccagccgcgggccgccggtgtccggccacgcgaccggcccggtgaccgcgcgcagccgcagctcgtcccacgcgatcgcgggattcggtgtgccgatgtgcgggctcggcgggatctcgccgtgctggagggccagcaccgtcttgatcaccccggccacgcccgccccggcctccaggtgcccgacgttgggcttgaccgagccgatcagcagcggacggtcggcgggacggccctcggcgaacaccgtgccgagcgccgccgcctcgatcgggtcgccgacccgcgtcccggtcccgtgggcctccacgtagccgacctcggccgggtcgatcccggcggcccggcaggcgcgccgcatcaggtggatctgggcctcgccgctcggcgccatgatgccgttggtgcggccgtcctggtggacggcgctgccgcgcagcaccgcgagcacccggtcgccgtcgcgccgcgcgtccgccagccgcttgagcacgacgaacccgccgccctccccgcggccgtagccgtcggcggcggcgtcgaaggacttgctgcgcccgtcgggggccagcgcccccgccgcgtccagcaccatcgacagccccggcgcggccatgaccaggacgccgcccgcgagggccaccgggcactcgcccgcgcgcagcgcctgcgcggccaggtggatcgacacgagggacgacgagcacgcggtgtccaccgccatgctggggccgcgcaggtccagcgtgtacgacacgcggttggcgaccccgcagtacgagccgccgatgcccgtccacgcctcgatgcggggcaggtcctcgagcagccgccggccgtagtcgtcggagccgactcccacgaacacgcccgcgtccgaaccggcgaggtccgcgggcgggatcccggcgtgctccagtgcctcccaggccagctccagcatgatccgctgctgcgggtcgagcagttccgcctcgcgcggggtgatgtcgaagaagtcggcgtcgaagccctcgacatcgtcgaggaacgcaccgcgcctggtcacgtcgcgcaccgcgtccgcgtgctcctggtcgcgggcggcgtacccgtcccagcggcccgcgggcagttccccgacggcgtcgccgccggtgcgcagcagatcccagaactcggccggcgacccgacgcccccggcgaagcggcatgccatcccgacgatggcgatgggttcgggggagttcatcaggggacggtcctccttcatccgccgcgggccccccggccgcgcggtgcgacgtcgcgggtccagggcacggtcacttgcggccgacgacgagcgtgtggccgaaaccgaggtcctggcggcggtcgacgcgggagaagcccgcgtcccggacggcccgctccatgtcgtccggcgcgtaggccatgccttcgcccgaggcgagggtgaggaagtacggggacacgagcccggcgctcatcgggccggtgccggcgtcgtcggacgtgaagttgtagaccacgcacacgcccccctcgggcagcgccgcgtggcacttgcgcagcagctcggtgttccgctccagcgaccagatctcgaagatgtggaagtacaggatcgcgtcgcagccgtccgggaacgggtcggcgaacaggtcgccggcgtggaagtggacgcgcttgcgcaggtccgggtcctcgatccggtcggcggccaggcgcaccacgctctcctggtcgaacaccgtcgcctcgagcccgggacggcgccgggccaggtggaggctgttggtgccgtcgccgccgccgaggtccaggacgtgccggacgccggagaagtcgtacaggtcgaggagctgggcgaaggcgtaccgggacgcgtcccccatgttggcgtagaagatccgctgcaggtccgggtgcgcggtgagccgctcgtacagcgtcgtcccggggccggtgatgtggcgcaggcccacgttggtgttccggcgcatcgcctcggcgaagtcggggagggcccggttgatgacctcggcctgcacgtcgacgagcgggccgaggaagcggcgtccggaccgcagcagccggtcccgggccacggcgctgttggcgtagccgtcctcgcgccgctccagcagcttcatcgaggtcaggcccagcagcaggatgcgggccggctgctcgtcgacgccgagcgccgccgccgtctccgcgacgtccattccaccggccgtctcgagcagctcgaagagctcgaattccagagcggtgcgaagcaattcgaaggcggtcgtgccgtgaatgatgaggcgtagatagtccgcctcggagacggtgacggtgcgactgtcgaccatgaatgattcccttgcagagttcgcgcgtccacgaatacggaagctgactcgatcgtgatcgcgcggtgcctgcttcgcaccttcgtgattgctgtaccggcggtgcgggatggggtcaaccgccgggttcggatggcgcatttctgaaggtgcggccggtccgcggcgggtgcgacgctgacgaggcggctgcggagtgacgcggccggcgcccggatatggcgcctaattcgcattctcggtaacggaggtgaatggtgtcgaccagtgcggtccccacccggaaagaactcgtcgcgcgggcggccgaattggcgccggtcctgcgctccaacagtgcctggtcggagaagaaccggcggttgcacgacgagtcggtccaggcgctcgccgacgcgggactgttcagaatgcgcatgcccgcccggtacgggggctacgagtgcgacacccggacgctggtcgaggtggccgccgaactggggcgcgccgacggctccgccgcctgggtggcgtcggtgtactggatccccgggtggatgacgtgcctgttccccgacgaggtccaggacgaggtgttctcgacccccgacgtgcgggtgtgcggaacgctgagcccgagcgcgatcgccgagccggtggacggcggcgtcgtcgtcaccggcaagtggggcttcatcagcggcgcccaccacgccgagtggcaggagatcatcgcgatcctgacgcccgaggacggcgagccgtacccggtgatggggctggtccccctgtcggagctgctggtcgtggacgactggaacacctcggggctgcgcggcacgggcagcgtcagcacggtcgcccgggacctgttcgtcccgcaggagcgggtcctgccgctgccggccgtcctgcaggggcagccggcgtccgcgcgcaacgccggaacgccgatctaccgggtgccgctgctgcccgtcgcgtccgcctcgtcggtcggcgccgtgctggggatggcgtacgcggcccgtgacgccttccacaagcgcctgcccggccgcaagatcacctacaccgggtacgagagccagcgcgacgcgacgatcacgcacctgcagatcgccgaggcgacgatgaagaccgacgaggcggagttccacgcctaccggctcgcggacctggtcgacgccaaggccgccgagggcacgccctggaagctggaggaacgcgcgcaggtccgggcggacctcggcgccgtctgccgcctcgccaaggaggccgtggacgtcctggcctccgcaagcggcggatcgtcgatctacgaggacgtgccgatccagcggatcctccgcgacgtccaggccgtcaaccagcacgccctgatgaacccgaacaccaacaccgagctctacggccgcgtgctgtgcggcctcgagcccaacacgctctacatctgacccgcggcatcgattccgcgggacgagtgaaggggagaacatgaccaagtccgacgccgccgcgccgtccgcatccgacccggcggccgtggccgccctcacccagcgcgtcgtcgccgcctgggcccaccaggacgccgaggggttcgccggggtcttcaccgacgacggcacgatgatcctgccgggcgtgtaccgcaagggccgcgacgagatccgcgcctacatggcggacgcgttcgcgggccagtacaagggcacccaggtcaccggcaagccgctcgacatgaagttcctcgccgcggacacggcgctcctgctcacccagggcggggtgctggccgccggggagtcggaggtctccgacgagcaggccatccgggcgtcgtggctcgcggtgaagcgggacggcgagtggcgcctcaccgcctaccagaacagcccctccgtgcagacgctgcccacgccgggggcctcggcgaaatgacgatgaacggtggcgggccggcccaccgggccggcccgtccggtccgatgatcaacgttttccagccggcgctgggagacgcggagctggcggcggtcaaggaggtcttcgacagcaactggatcggccgcgggaggcgggccgacgcgttcgagaccgcgttcgcgcgccacatcggggtgggacgcgcgcacgtcacgtcggtcaactcgtgcaccgaggcgaccttcatcgcgatggacctggcgggcgtcgggcccggcgacgaggtcgtcctgccgacggtgagcttcgtcggggtcggcaacgccgtcgcgtcccgcggcgcccgcccggtcttctgcgacgtcgacccgcggacgctcgcccccacggtcgacgccgtcgcgggggcgctgaccgaacgcacccgggcggtggtcgtcctgcactacggcggctacccgggcgacatcgcgcggatcgccgcgctgtgccgcgaccggggcgtcctgctgatcgaggacgcggccatcggcatcgcctcctcggtcgacgggcgcgcctgcggcacgttcggcgacttcggggtgtggagcttcgaccacggcaagatcgccgtcgcggtcgacggggggatgctgtacgtccgcgaccccgagctggcggcgcgcgcgcccaagctcgcctacctcggcctggagcagaagagcggcttcgaccaggccctccaccgcgacacccggtggtgggagttcgaggtgtccgacttcgcccggcgctcggtcaccaacgacgtgctcgccgccgtcgggaacgtccagctgggacggctccccgggttcatcgaccgcaggcgggaggtcgcgcggcgctacgacgcgggcctcgccggcgtggccgggctggaccgtccgccgccgctgccgccggggcacgagtcgtcctactacatgtactgggtgcagttcgagggagggatcagggaccagatcgcccgcgacctgtacgaccggggcatctacaccaccttccgctacccgccgctccacctggtcaaggcgtacggctcggacgcggtgctcccggacgcggaggcggcggccgcccgcaccctgttgctgcccatgcaccagtcgctcaccgacacggacgtggagcgggtcgtcgacgccgtgcgcacgtgcgtccccgcacgtctgcgggaacgcgaccgcgcggtgacatgaatggagggaaagtgccggacaaccagccggacccggggaccgtcgcggtcgtcgggctcgggtacgtggggtcgtgcctcgcggcggccctggccgagcgcggcctgaacgtcctcgggatcgacaccgacgagcagctcatcgacgagtacaacgcgggcttctgcaggttccgcgaggacatgctggcggacggcatcgcccgcgcgctggcggcgggcaggctgcacctgaccaccgaccaccgggccgtgtcccgggccggcgtggtgctgatcgccgtcggcacgcccgtccacgccgacgggtcgctggccgacgggcagctccgcgccgcctgcggggcgctcggcgagcacctgcgccccggccagctcgcggtgctcaagagcaccgtcccgccgggcaccacccgggagctggtgcggccgctgctggagcagggcggcctgcgggcgggccgggacttccggctggccttcagcccggaacggctcgcggaggggacggcgctcaccgaactgcgctcgttccccatcgtggtcggcgggatcgacgcgcgcagcaccgcggaggcggcggagttctggcggcggggcctgggcgtggcgacggtcccgcaggagtcgctggaggccgcggagctggtcaagctcgccgacaactggtggatcgacctgaacatcgccctcgccaacgagctggccaggctgtgcgcgctgtacggcgcggacgtcctggacgtgatcgaggcggccaacaccgtccccaagggcaacggccacgtcaacatcctgctgcccggcgtcggggtcggggggtcgtgcctgaccaaggacccgtggatggtgtggcacgcggcccgcctgcgcgggctggagctgcacacgccccgtgccggccgcgcggccaactcggcgatgccggagtacaccgcgcagctgatcatcgacgacctgctcgagtgcggcaaggaccccgccaagtccacggtcgcggtgctggggctggcgttcaagaacgacaccggggacctgcgcgccaccccgacccagggcgtcatcgcggccctgacgaaggccggggtgcgggtgcgctgccacgatccgctggtcgacgccgacgcggccgaggacctgctgaacgtccggccgctgcccacggtggaggagaccgtccgggacgccgactgcctggcggtcctggcccaccaccgcgcgttcgacgcgatcgagtacgccgcgctggagccggccgggtcgtgcctgatcctggacggccgcgaccacttcccgaaggacaaggtcgcgaagctccgcgagctcggctaccgctaccgcggaatcgggaggtgagcatggaacgcgcgctcgtcacgggcggttcggggttcatcggcgcgcacctggtcgaccggctggtcgcccggggcgacgaggtgaccgtcttcgacgcggtgccgtccagggacggccgcggctcgccccgggagcacgcccgccacgtcaccggggacgtccgcgccgccgacgcgctggccgaggtgatcaagcccggggtcgacgtcgtctaccacctggccgccatcgtcggcgtcgaccggtacctcacccggccgctggacgtcatcgacatcaacgtgctcggcacccgcaacgtgctggagctggcggcccgcgccggcgcccgggtgctggtcgccagcaccagcgaggtcttcggcaagaacccggcggtgccgtggggggaggacggcgaccgggtgctcggcccgaccacggccgaccggtggacctactcgtccagcaaggcgctcgccgagcacatgacgttcgcgttcgggcgccagcacgggctggagtcccgggtggtgcgcttcttcaacgtgtacgggccccggcagcgtccggcctacatcgtcagccgcagcgtgcaccgcgcgctcaacggcgtcccgcccgtcgtgtacgaccggggcgggcagacgcgctgcttcacctacgtggacgacgcggtggagggggcgctgctggccgccgggaatccggcggcggccgggtacgcgttcaacatcggcaccacggacgagacgacggtcgccgaggtcgtcgcgctggtcaacaagctcgccggggtcgaggccacgcccttgcaggtggacacggccgagaagctcgggcccgtctacgaggacctgccgcgccgggtgcccgacaccgtccgggccgccggcctgctcggctggcgtcccggcaccgggctggaggacggcctgaccaggacgatcgagtgggcgcgggcgaacccgtggtggctgagcctgccggaccagggcgccacctgaacagaggagccgttcgatgaccgagagcccacgaccgccgtccgcggagcccggtgcggagcccggcggggagcccggtgcgccgcggcgccggacgcgtcccctcaccggggacgagtacctggagtcgctgcgcgacgggcgggagatccacctgtacggcgaccgcgtcaaggacgtcacgacccatccggcgttccgcaacccgagccggatgacggcgcggctgtacgacgcgctccacgatcccgcgcggcgggacgagctgaccgtcccgaccgacaccggctccgacggccgcacccatccgttcttcaccaccccgcgcgactccggcgacctggtcgcggcgcagcgggccatcgcggggtgggcgcggatgagctacggctggatgggccgcagccccgactacaaggggtcgttcctcggcacgctgggcgcgaacgccgagttctacgagccgttctccgacaacgcccgccgctggtacgccgaggcccaggagaaggtgctgtactggaaccacgcgatcgtccatccgccggtcgaccggaaccgcccgcccgacgaggtcgcggacgtgttcgtccacgtggagcgggagaccgacgccgggctggtggtcagcggggcgaaggtcgtggccaccgcctccgcgctgacccaccacaccttcctggcgcactacgggctgccggtacgcaagcgggagttcgcgctcatcgcgacggtgccgatggacgcgccggggctgaagctgatctgccggccgtcctactcggccgcggcggcggtcatgggctcgccgttcgactacccgctctcctcgcggctggacgagaacgacaccatcctcgtcctggacaaggtcctcatcccctgggagaacgtcttcgtctacggcgacctgggcaaggtgcagatgttcacggcgcggtcggggttcccggagcgcttcaccttccacggctgcacccggctggccgtgaagctggacttcctggcggggctgctgacgaaggcggtggagctgaccgggacggccgggttccgcggcgtccagacccgcctgggcgaggtgctggcctggcggaacctgttctgggggctgtcggacgccgccgcccgcacgcccgtcccctggaaggacggctccgtgctcccgaaccccgactacggcatggcgtaccggtggttcatgcagctcggctatccgcggatcagggagatcgcgctccaggacgtcgccagcgggctgatctacgtcaactccagcgccgaggacttcgccgaccccgaggtccggccgtacctcgacaagtacctgcgcgggtcggggggcgcggactcggtggagcgcgtcaagctgatgaagctgctctgggacgcggtgggctcggagttcggcggacggcacgagctgtacgagcgcaactacgcggggaaccacgagaacacccgggtggagctgctggcggcccagaccgtcggggggcagctggacgcctacaaggcgttcgtcgacgagtgcctggccgagtacgacctggacggctggcgggtgccggacctggactcgttccccggcctccgcggcctgcgcgaccgtctcgccgaaggcggcggagcctgaccgtcgcggacggcaggctccgatgcgagccgacggaccgatgtgggccggtgggccggtggacggcggcgcggcgggcgttacacgacgtggacgtccggcacgtagcggatccaccggccgccggcgttccggaactcgcgctccttcgccatgatctcgtcggcgtggttccacgcgaacagcagcgcgtaatcggggcgggcccgcctgaactcctcgggcggccggaccgggatgtgcgatccggggacgaggagcccctgcttggcgggggtggagtcgctcacgaacggcaccagctccggcccgatgccgaagaaggcggtcgcggtggcggccttgccgggcgccccgtagcccgcgacggtgtgcccggcggcggtgatctcccgcagcagcccgagcaggtcgtcgcgcaccccggcgatggtgtgggcgaactgcgtcagcgtcgcggggtcggcgagccggcggacggcctcggcgtccagcatccgctgcacggcgggggacgggcggcgtgccccggccgggctcagcgtgtagcggatctcgccgccgtgcaggggagtgggggcgacgtcgaccagctccagcccgaacagctccgccgccgcctggacggacctcgccgtgaagtagtagcagtgctcgtcgtagatctggtcgaacgccgtccggtcgaggatcgtcccgaggtagggctcctcgaacacgaagatcccgtccggcttcagcagccgcaccgcgccgcggaagagcgactccaggtgcgcgatgtggcagacggtgttcgcgccgtagaggacgtcggccggaccgtcggccgcgcggatctcctcggccagtccctcgtcgaagaaggcggtgcgcacccgcacgccgcgctccgccgccagcgcggtgacgttcgcggacgggtcgacgccgagatgccggacgccggactcggcgaccgtcgagagcatgaccccgtcgttgcagccgatctcgacgatgaacgggtccgcgccggccagttccgtgcgcagcaggtcccgcgcgaccccctcgaaatgcttgcggtgcccggccgagcccgacgcgtggtaccggtacgagccgtggtagcgcatttcctgcgggaccacttcgtgcagctgcaccatcgtgcaggcgtcgcacatgtccagtgcgagccggaaggtgaattcgcgttcggcctcttcgggcgggatgaaggcattggctctcggctgccggccgaggtccaggacctgccggaccgcgcccccgcaaatcttgcattcgtcgctcatgctgtgaagttagacgtttcgccgataggccgcttcttccggcgtgcgcgatcggcgccgagaaaggcgcgaaatgcggcatcgcaatctgaaagatgcccgttcgccgcggtctgcgaaaccattcaggggcgtggccgccgggtcgacgagcgttcggtcacggcctcgcgccggtgccgacgatcgttcgaaccccgacgaaggtggtgctcatgaaggcggccgtgatccccaagcccgacgcgacgtgggaactccgcgaggtcgagaccccgcgtcccgggcccggggaggtgctgatcagggtgcgtgcgtgcggcgtgtgccacaacgacgtgctggccacccgcggggcgatcccgttcccctcgatcagtcccgcgatcaccgggcacgagccggcgggggaggtcgtcgagctcggctcgggcgtcgtccggcgccgggtgggcgaccgggtcggcaccacctgggtgcgggccgggtgcggcacgtgcgcctactgccgccgcgaccttccggtgacggggcagacggcgatgaactgcccgaacccggtcacgacggggttcaccgtgcagggcggccacgccgagtacatggcggtgcgggaggaggagacggtcctcctgccggacgagctgccgttcgagctcgccgcgcccgtgctgtgcgccgggtacaccgcctggtccgcgctgcggacggccgagcccgcgccgcacgagcgggtggcggtgctgggcatcggcggcctgggccacctggccctccagttctcccgggcctgcgggttcgagaccatcgcgatcacctcgtcgccggacaagtacgacctggcccgcgagctgggcgcggacatcgtcgtgcgcgacggcgcgcagctgtgcgcggcgggcggcgccgacgtcgtcatcgcgaccgtcccgtcccatccggccgcggcggcgggcctccaggggctgcgggccggggggcggatggtgctggccgggatcgacgcggccgagccgttcaccattcccccggcgatgacgttcccgttcttcgcgcaggggcagcgcatcatgggcgccacccacggcggccccgtcctgctccgggaggccctcgacctggtcgccgagcggaaggtgaccccgatggtggagacgttccccaaggagcaggtggccgaggcggttgagaagaccgccaagggggaactccggttccgcgccgtcgtgacctactgacccgtgcggaccggcccgtgcgaagtcgggggacagcatttcagcggatgcggggagaaaaacccgcctcgacaattctgatatgagtgaactcggaaagcgggccgtggttctgggcggcagcatggcgggcacgctcgccgcgcgggtcctttcggaattctacggcgaggtcctggtcgtcgaacgtgacgcggtgctcggtgtccggacgccgaggcggggggcaccgcacaccgtccacgcgcacggcctgcacgcgcgcggccacctgatcgtggaggagctgttccccggcctcaccgacgagctgcgcgcggacggggtgccgaccggggacatcgcggggatgcgctggtacttcaacgcccggcggatcatgccggccgacaccgggctggtgtcgctgacggccccgcgccccgtcctggaggcgcacgtccgggcgcggacggccgcgctgcccggggtcacctacctggagcggcactcgatcatcgggctgctcaccaccgcggaccgcacccgggtcaccggggtccgggtggagcggcgggacgagcccggggagatcgagctggaggccgacgtggtcgtggacgccaccgggcggggctcccggacccccgcctggctggaggagctcggctaccggcggccggaggaggagcgcgtcaaggtcggcctggcgtacacgacgcggcactaccggacgcggccggagtggttcgacggcgtccagtcgatcaacccggtggcgtccccggcccatccgcggggcgcgttcttcggccaggtcgggccggacacctgcatcctgtcgctcaccgggatcctcggcgaccatccgccgaccgatccggaggcgttcctggagttcgcgcggaccctccccgtcccggacgtctacgaggcggtccgcgacggcgaggccctcgacgacccggtcagcttccgcttcccggcgagcgtccggcgccggtacgagcggctcgaccggttccccgaccggctgctcgtgctgggcgacgccgtgtgcagcttcaaccccgtctacgggcagggcatgagcgtcgcggcgatcgaggccatggagctgcgccggcacctgcggcagggggcgccccgccccgccgagtacctcaccgcggtcgcccgcgcggtcgacgccccgtgggaggtgtccgcgggcggtgacctcgacttcccgggggtggagggccgccgcacgctgaaggtccgcgccggcaacgcctacatggcgcgcctccagtacgcggcgacgaaggacccgaaggtcaccgaggggttcatgcgcgtggccgggctcatggaccctcccaccgcgctcatgcgccccggcatggccgcccgcgtcctgcgccacgcgatccgcaggccggctccgggccggtcctggctggacggccggtccccggcggccgacccggcccgctcctcctgaccgctcctcccggccgcgcgcgtccggcgcgggtggcgcgggacgcgcggggcggcgcgggacggtcgggggaacccgccgtcccgtgtcagccgggggcgccggacgcggccgggtcgatcacgctgtgcgcggcgaccggactgacgagggcggcgcggacgtcggcggggccggacagggacgtgccgtccaggacgaccgcgtcgcggagccgcacgccgcgcagcgagcagtcgcggccgatggcggcgtccgggccgatctcgcagtcggtgaggacggtgtccgcccccacgagggccgggccggtgatccgcgaccggaccacccgggcgcccggttcgatgacgacggggccgccggtcacctcggtggccgcgtcgaggtcgccgtccgtgcggggccgcagttcggcgaggaggcggcggttgcacgccaggacgtccgcgggccgcccgatgtcgcgccagtggccggtgtgctcgacggcgcggacggtgcggccccggtcgatcagcacctggatcgcgtcggtgatctccagctcgccgcggcggctcgggcggcaggcgtcgatcgccgcgtgcacggcggaggtgaagaagtagacgccgaggacggcgaggtcggtgcgcgggtgcgcgggcttctcctcgagccgccggacgacgccgtcccgtccgacctcggcgaccccgaaggcgcgcgggtcggcgacccggcgcagcaggagctgcgcgctggggcgccggtcgcggaagcgccgcgccgggccggcgatgccgcccggcagcaggttgtcgccgaggtacatgacgaagtcgtcgtcgccgaggaaggggcgggccagcgtgacgcagtgcgccaggcccagcggccgggcctgcgggacgtaggtcacccggagcccgaggcgggcgccgtcgccgatcgcgtccatgacggccggggcggtgtcgcccaccacgatggcggtgtcccggacgccgatgtcggcgatgccgcgcaggacgtgttccaggaccgggcgtccggcgagcgggatgagctgcttgggaagcgaattgctgaaggggcggagccgggaggcggtgccccccgccagcaccagagctttcatggcgttcacccttgtcgagtcgcttccagcgtacggacgaggggacgggggatcttctcgtgacgtgccggctccgcgcccggcgccggccgcgccccgcccggcctcgcgccgtggcgcggccggggcgcggccgatgcgggtccggggcggggtcagtcccgggcgctgatctgctggacggcccagctgttgccgtccgggtcgtcgaagaagaggaagccggtgttgtcgagccagtcgccgtcctggtaggcgcgcatgctgccgtcctgcgtgaagacctgcacctcgccgaccttcacgccgcgctcggtgagctcggcgtgggcggcgaggatgtcgcggacgacgagctgcaggccgcgcatcgaccccggcggcatgtcgttcatgtcggcgcccagcatgacggagcagccggacccgggcggggtcacctggatcatgcgcttcccgtcggggcgcacggtgtcgatgtcgacgttgaagccgagcccctcggagtagaaggcgagagagcggtccaggtcggtgaccggaaggcagacgacctcgagcgtccaattcatggtgaatgtcctttcgtgtgcttttttcggcggcaggggatcggggccgccatcggtacagacggcgcgcaggcccaaaattcatcgccctccggacgatcgtcgcgcgaatcggcccgtttcgcgcggctttcgcacggagagagatgtgacgtgctggacgggcggcgatactccgaaaaacgggggcccggcgggatcgacgccgggcgttcgcccgagcccttgcacagcgaacggaaggggaggcgcggtgagcacctccgacctcgatttcgtcccggtcgcggtaccgcggcccggcaccggcccggcggcggcgccgtccgcgccgccgccgggcccgcccgcgccgcccacctcggcaccgccgcccgcgcgctcgatgcgggacctgcgcgccggccgggacgagctgcgggcgcgggcggccgagggacgggccgaggggatcgagcggcagcacgggctcggcaagcggaccgcgcgggaacggctggagctgctcctcgacgagggctccttcatcgaggtcgagatgttccggcggcaccaggcgcacgggctgaagatcggcgcgaaccgcccgtacaccgacggggtggtcgtcggatccggcacggtccacggccgccgcgtgttcgtctacgcccaggacttcaccgtgttcggcggctcgctgggcgccgcgcacgcgtcgaagatccacaaggtgatggacctggcgatcgcgaacggggccccgctgatcgggctgaacgacagcgggggcgcgcggatccaggagggggtgcaggccctcgacggctacggcgggatcttccgccgcagcgtccaggcgtccggcgtgatcccgcagatcagcgtggtgctcgggccgtgcgccgggggagcggcctactccccggcgctgagcgacttcacgttcatggtgcgcgacaccgcccagctgtacctgacgggcccggacgtggtcgaggcggtgagcggcaagcgggtcacgcacgccgagctcggcggggcggacgtgcacggggaccggaccggggtggccacgttcgtctacgacgacgaggagacctgcctggaggaggtgcgcttcctgctctccctgctgccggacaacaacctggagccgccgcccgccgcgcccccgcgcggggcggccgacgacgagcggccggagctggcggagatcgtcccggtcgagcccagcaagccctacgacatgcggctcgtcatcgccgagctggccgacgacggcgagttcatggagctgcacgagcgctgggcggcgaacgtgatctgcgccctcacgcggatcgacggcgaggtcgcgggcgtggtcgcgaaccagccgatggtgctggcgggcgtgctggacgccgacgcggcgcagaaggccgcgcggttcgtccggttctgcgacgcgttccggatccctctggtcacgctggtggacgtgcccgggttcctgcccggcctggagcaggagcacgcggggatcatccggcacggtgccaagctgctgtacgcctactgcgaggccacggtgccgcgcgtccaggtcatcctgcgcaaggcgtacggcggggcgtacatcgtcatggactcgaggtccatcgggtgcgacctctcgctcgcctggccgacgaacgagatcgcggtgatgggcgccgagggcgccgtgaacgtgctgttccgccgggagctggcggcggcggccgatcccgccgccctgcgcgccgaactgatcgaggagtacaccgggcagctcgtccatccgtactacgccgccgagcgcggtctggtcgacgacgtcatcgacccggtccggacccgtgccgtcgtcgccggggggctgcggatgctgcggaacaagcgggtccggaccccgcagcgcgtccacgggaacgtgccactgtgacctcgccggaccgcccgcccggggcggtccggcgggacggtgtcaggtgaccggggcccgccccgtctccaggcccgtctccaggccggtctccgggtcgaagcgcgccgcggagccggtgacggacgccgtggcggcggtctcggtgtcgcccgccccgatcatcagggtgacgagctgggactcgaagcacgtgtcggcgccgtagggctcgacgaggtagccgcccagctccagcgtgaccaggccgtggatcgcgctccacatccggtgggcgaccagctcgggatcgccggggcggaaccgtcccgcctcgacgcagcgcccggcgcaggccgtcacgtacaccagggtgtagcggccgtgctggcggtcctcgtcggtcagggagaagccgccgagcgaggcgccgccgaacatcaccgcgtacaggtgcgggttggccagggcgttgtgccggtaggcgcggcccagcagcgccaggtcggcgacgggatcgtcgctgtcgcgcacctgggtgaaccgggtgtgcagccgcgcgaaaccctcgcgcaccatctcccggaccagctcccccatcgatccgaagtgcgtgtagacgcccatcgtcgaggtgcccgcctcggcggcgatgcggcgcgtggtcagcgcctgcgggcccttctcggcgagcaggcgcgcggcgacgtcgatcaggacggtgcgggcccgtggatcaggtcggcgtggactcatgattgacagtgttacataacaccgatattttttaatgcacaacactgttatgtcatgggtcggcagggaggcgcgtgatggccgccgagacgcagggaaccgatccgcggacggcgccggccgccgcgcccgcccaccgcgcggacgctccgctccccgtggcgggcgggctccccccgggcctgcgcgcctgcttcctccaggccgagacgcacccgctggcgcccggcgcgggcggcgagatcctcgccgggccgcacctgctctccggcatcgtgctcgacggcgggaccgcgcggtggctccgctgcgcgccgcccgtcgggcggaaccggccgctcggccccgtcccggcgctcgcgcccgtcctgtggacgggcgcgcgggaggcggatccggacgggccggggacggtcgcgttcgcgcgtccggtccgggacccggcgagcggccggtggcacaccgtcgcgacctatccgggcctcgggcacgccgaacacctggtcaccgcgccggacggcaccgtcgtccacgccgagccgttcccgctcgacggcgctccgctcgtccacgccgtcggcctcaccgcccggtacctcgtcgtgttcgacctgcccgtggcccactcgcgcgccgccgcgctggtcggggagcggccgccgtacgcgtggcgggagggccggcccgcgcgggtggggttcctgccccgcgccggaggggcgcccgtgacctgggtccccgtcgacccctgctacgtcttcgacgtggtcgacgcccgcgacgacggaccgcacgtcgtgctggacgtcgtcgcggcgcggcgcgcgttcgacggagcgggcgcgtccccgtcccggctgcggcggtggcgcttcgaccccgccgccgggacggccgcgaccctccgcacgtccgccccggtcaccggcgcggtcgccgtcccggccgcggaaccgggcgcgcaccgcctggtcgcgaccgagcccggtgggacggtcgtcctgcacgacccggcccacggcacgtccgcccgcacgtcgctcggccgggggtggcggcccggcgcgcccgtcttcgcgcccggcccggagaccgggggctggatcctcgccgtggcgcggcacgccgcgtccggacgctgcgagctgcgcgtcctcgacacctccggccgtccggtggcggcggtgcggctgcccgtgcggctcgcggccggccgggccgtccggtcggccgccgtccccgacgccggcgccctcgccggcttcgccgcccgcgccgccacctgacgccccgccgtgcccggccggacgccgcagacggcggcgggcgtccggccggaggccggtcaggagtcggggatccagcttccgtggaaaccggccgggacgcgccggggcagccggacggacgcggtggtccgggagacgtccgtcgcgtccatgaccacgaggtccgcgccggacgggccggagacgatcgacagcagccagccctcgtcctccgcacgcgccccctcggccgggacgaagacggcctcgccgacgctcgcgccctcctcgaactcgcgcgcggaggaggacccgtcgcgcacgtcgtacttcacgatcgcgttcccggacacggtgtagaggaaccggttcggcaggcccgtccggtcgtcgtcgtgggtggggaactccacgccccggtcgtccagcggctcctcggccgcgcgtccggtcgcggggtcgagcgtccagcggtgcaggcgggcctcctccaggaggccggcctcccgggcggggtcggccgacccgccgatcatcgcccacagggcggtgaactcgtcgggggcgtagcgcacggcgtcgaggacgatgcggcccgccccgtcctcgtgggcgttcccgacgtggaacacgtagcacgggtcgatgtcgaaccagcggacgtccccgccgccctcccggggcatgacgccgagccgcgccccgtacgcgtcgtcccagcggaacggcatggacgtctccttcatcgccaggtcgaggtcgaagacgacgggcaggtcgagccagacgacgtggttctcggtgatcgcgaagtcgtgcgtcatcgtcccggcggggacgtcgatctcgcggctctccacgagccgtccgtccgccgagagccggtggtaggtcaggtggggcgggaagacgccgtagccgaagaacagcagctcgcccgtcaccggatcccgcttcgggtgcgcggtcatcgcggtggtgaggcgcccgccgaagtcctcgaggccgaccgtcccgagctcgggcgtcagcgcgtgcgggaggccggcctcgacgagcgcgaggatcttccccgcgtgccggacgacgtgggtgttggcgggcaccgcggtgaggtcgagcgtcccgtcgtcccgcaggaacggggcgtcctcggtgagctcccgggtccggacccagcggttgcggtaccactcggcccggcccgcgcggagccgcacgccgtggatcatcccggcgccggtgaaccagtgggtgctcggccgtcccggccgcgggttggggccgttgcggaagtagcgcccggtcagctcgggcgggagcgtgccggtgacgggaaggtcgagcgcgtcgatctcgtccgggacgggggcgaggtgtccttcaagccatatgccggtgtcctgcgtcatggcggatcctgcctttcgtgggggccgggcggaacggtcggggccaccttgagggcacgatccagtattgacaggtcgaacctagacattccaccggccgccgcgaggccgcgcggaacgagaagcgggccgggccgccgcacccgcgagtgcggcggcccggcccggcggcgtcagcggaagtcgtcggcgtggtcggccgcccagtccgcgaacgtgcgcgccggacgtccggtgatgcgctcgacctcgccgctcggctcgacctcggcgcccaccgcctccgcgcgcaggcggagcaggacgtccgccaggccctcccgcatgtagggccgggccagcatctcctcccgcgcctcctccggggtgatctcctcgaagggcaccggacggccgatcgcctcgccgatgacgcgcaccttgtccgggttcgtcagcgcctcggggccgctcagctccggacgggcgcccaccagcgcgtccgtcagcagggcgcgggccgcgacggcggcgatgtcgcgctcgtggatcggcgtcgtccgtcccgccgcgaacggctcgcgcaccggacgtccggcgcggatcgcgtcccgccagcccagcgcgttggacgcgaactcgccgggacgcgcgaacgtccactcgagcccggactcctcgatcgcccgctcgaacgcgaggtggtgggcggccagctcgttggcggggtcggggtcgaaagcggcggccgacgacagcatgacgacgcgccggacgccgtgctcggcggcgcggggcagcaggtcgccgagaccgccccagaacgccgcggggttgaggaagatcgccgtgacgccgtccagcggcatctcggcggtgggggcgacctcgacctcggcgggcagccgggcggacgccgggtcgcggctgagcgcgcggaccttcgcgcccgcgcagagcagctcgccgaccacgtggcggccgacgttaccggtggctccggtgacaaggaacatggcggttctcactttcggttcggaaccgcaccaggttcaaccaactggatgaacttgtcaaccaactggatgaagtcgcgcccgcacggctacgatgaccgggtgacggacagcaggccacgggcgcggcgggcgccggacccggacgaacgcaagctcgacgccgagcgcacgcgggcgctcctcctggaggccgcgctggacgagttcgccgcgaaggggtacgcgggcgcccgcgtgcaggacatcgccgaccgcgccggggtcaacaagcagctgatcagctaccacttcggcggcaaggagggcctctactgcgaactcggccgccgctggctggagcgcgaggccgagttcaacgatcccggggtcccgctgcccgacctcgtcgtccggtacctgcgcaacgccctggacgacccgcgcggcagtcggctggaggcgtggcgcggcctcaccgaggaccccggcgacgcggaactcctgccgcccgaggacctgaccgacatggagagccgcaaggccgccggggagatcgccgacgacctcgaccccggctacgtcatggtcgcgctgcaggcgatggtgtcgctgccggtcgcccggccggcggtcgtccggcgcgtcctcggcgtggacccggcgtcgcccgagttccgcgaatgctacgccgagcagctcgcccgcatcgtccggtacctcgcgggcgcgcggccgccggacggcgagccgcccgcccgctgaggcgtccgggtcagtcctgccagaactggaacagcgcgtggccgatcgcgatctggagctcctcgaggccgatcgcgtcggtgacgtagaagacgaggttgaagaagccctcgttgatggggccgagccacagcagcgcgaccagcaccaggaacgcgtagcccgcgtactggttcgcgtgccgcacccagctccgcggcaggtacggctcgacgatcccgaagccgtccaggcccgggatcggcagcaggttcaggatcgcggccgtcacctggaggaacgccaggaacgccacgccgacccagaacacgctgtgggcgtcgtcggcgagagtgttgatcaggacggccagcaccacggcgaacaggacgttcgacagcgggcccgccgccgagatcaggctgtgccggatcttcccgcggatcgagtgccggtcgatccacaccgcgccgcccggcaggccgatcccgccgagcaggatgaacagcaccgggatcgcgaagctcagcaccatgtcggcgtacttgaacgggttgagcgtcaggtagcccttggtcgcgacgctgtggtccccggaccggaacgccgtgtaggcgtgcccgaactcgtgcaggcacagcgacagcacccacccggccagcacgaacacgaacagcgcgatccgggccggctggtcggtgatctgcccgtaccgccaggtgaccagccccgccagcgcggtcgccgccacgatcacgaggaacaccgggctcggccggaccgccgccgcccttccccggccccgccgcgtctcgggtgcgatctccgtcatctcatgccccttccgccgcgatggcgggtacgacgtaggtgcgcaggaagcggcgcagcccgtcggcgtcccggtcgcggtccatcacgatcagcgaggtgatgatccggaagaggaactccaccgtgccctccacctcgatgtccggcctgagcgtccgccgccgctgcgcgtgctcgaagtggggccggacgtactcgcagcacaggtcgaggacgtgctcgcccgcccccgccaccgccgcctgcatgtgccccgccgcctcgggcaccaggaagtgcgcgatcgtcggcgcgccgcggacgtactcgaccgcgtccagcgtgccctcgacgatcgcctccggcaccgaccgctccgcgcggagccggtcggccagccggtcgaggaagcgcagcagatcgcgcaccacgacggcgaggatcagttcgtcgcgtcccccggtgacggcccggtagaccgtcgcccgggacagcttcgccgcggcggcgatgtcctcgacggtggtcttggccaccccgaaccggccgaagcactcttcggcggcgtcgatgatgcgctcacgggtggcgtcggaggcgaccgggggcatgcctgaacattaccggccccccgcccctgcccgtgatgcgtaggcgattccctacgcttgacatgtaggcagttgcctacctatcgtgtgccgcatgaacacggacgtcttcgccgcgctggccagcccggcgcggcgcgagctgaccgccctgctgctggacggcccgcgctcggtgaacgacctcgcctcgcacttcgcgatgagccggccgagcgtctccgagcatctgcgggtcctgcgcggcgccgggctcgtcagcgagcggcgcgacggccggcagcgcctctacacgctcgaaccggggccgctgatggaactgtcggaatggctcacaccgtacgagcggttctggcgcgcgaagctgtccgacctgcgaacactgctggacgacgagcaaggggagcccacatgaacgagcacgcgatcgaggtcgacgagttcctgccgcacccgcccgcgcgggtctggcgcgcgctcaccgaccccgacctcctcgcccgctggctgatgccgaacgacttcgagccgtccgtcggccaccgcttcaccttcgccacccgtccggtcccgagtgccgacttcgacgggacggtccactgcgaggtcctcgagatcgacgccgagcggctgctgcgcatcagctgggccggcggcggcctcgacaccaccgtcacctggcggctggcccccgagggcaccggcacccgcctgttcatcgagcaccgaggcttcgacctggacgaccccgcgcagcagttcgcgttcaagggcatgggcagcggctggcgcaccaacgtcctgcgagccctgcaggacagcctcgccgaggtcgcgtgaggccgcgcctcagccgaagtagtggccgtcctcgaggtccctcggcacccgcctccgccagcttcgcggcggccgcgtccgaacgggcgaggccgacgacccgatgcccggcgccgatgagttcgcggacgacggcggaaccgatgaacccggtcgcgccggtgacgaacacgcgcatgatccactccttcgatgggaaccgacgggtcccatcgtcggcagcgcgaacggcccgcgtccaaagcctcttccgcaaggcgcaatgcgctccgggcatcacccctggctaggctcgggggcatggccgacctggacctccgtctcgtccgctacttcacggccgtcgccgagcaccgccacttcggccgcgccgccgaggccctgcacatcacgcagccgtcccccagccgccaggtgcgcagcctcgaacggcggctgggcgcccgcctgctggaccggacgccccagggcacccggctcaccgaggcgggcgaggtcttcctgccgcacgcccgagccctcctgcgttcggccgcgcaggccaccgcgcagacccgcgccgccgccgaacccgaccggatcacgatcggctacacgagcatcatcgtcaccccggccgtccgcgaactgcgccaccggcacccggacgccgacgtccgcaccgtccacgtcgcctgggacgaaccgtccgccgccctgctcgaccaccgcgtcgacgcggtggtggcctgcctcccgttcccgaccgacgggctgcacgtcaccgtcctctacgacgagccgcgcgtcctggtcgtccccctcgaccaccgcctcgccgggaaggagtcggtcaccctcgacgacatcgccgacgagcccatgccccgggtgtccgacccggacccggcctgggaggcgttctggcgcatcaacccccgccccgacggacgtcccgccccggacggccccctcatggaagccctcgaggacaagttcgagttcgtcgccgcgggcgaggccgtcgccatcatgccccgcccgcgccaccacgccgtccgccccgacctcaccacggtccccatcgagggcatcgacccgagccacgtcgccctcgccacccgcaccggcgaccgcaaccgcctcgtcaccgacttccgcaagatcgcccaagcccatctgaccgcccccgccgggtgacgagcggccacctcgcagcggccatatccattccaatatcgaatgctgatccatatcgatattggacgaactcgaatggtcgatgatcttctagctcgcatgccccgaccctttcggctgcggccggtcgtcgccgctatgaccacctgcgccctgctcggcggcgcggcctgcggaaccgcccccggcgacacccgcgtcgcgacacccgtcgccgacaccgtcgtcgcgtccgacgccggcctgaaaaagacgttggcggaactggagaagtcgtacaacgcgcgtatcggcgcggtgggcatcgacctcggctccggcaagacggtcggttaccgggccgatgaacgcttccccttcaactcgatgttcaaggtgttcgcgtgctccgccgtcctgcacgaagcgcggaccggaagccccggcctgatggacaaggtcatccgctggacgccggacgagatggccgggctgaccgagaactccccggaaaccaccgaatacaccgacaccggcatgacgcccgcgcaattgtgccgcgcggggatcaccaagtccgacggcttcgcgggcaacacgctgctgaagcagatcggcggcccgtccggcctgacggcgttcttccgctccaccggcgaccgggtgagccgcctcgaccgtcccgagccgtacctgacggagtgggagcccggccaggtccgcgacaccaccacccccgcggcgtccgcccgcaccttcgccgaactcaccaccggcaaaaccctccacccccgcgaccgagcgcgcctggtcgactggctgaaggccagcctcaccggatccagccgaatccgggcgggactgccgaaggactggacggtcggcgacaagaccggcaccggcggcgcgaagaaccacggcaccgctggcgacatcgcgatcgtctggccgcccgggacgaaagcgccgatgatcctgtcggtgctcacgaaccgcaacaccgacaacaccccgcacgacgacaaggcgatcgcccgcaccgcgaccgccctggccgaagccctcggccgcctctgaccgcttcaggccgtcccgcaccgcgcgatcaggagcacccaccggcccgaccgctgacatggtgatcacatggcgactcgacaacgcgaccttcgccaccgggctcgtgccgtggagcgcggtccaggagtcttgagcctcggacgctcgaccggggcggattttcccagtgaacactggcgtttttatggcgctgtccggatgatgtcgatatgagatcactcccggcccgcctggccgtcacggccgtcgcgttcgtggccctggcgcccgtgtccgccgtgcacgccgcgcctccgcccgcgacgctgagagatgtcccgctgccgttcctatggccccgggcgggggtgtacagcgtcgccgccgtctccgacaccgaagcgtggttcgccggagtccagggattcgtcaacgagcccggtggcaacccggtagtgcgtcgccggatgggctcggagtggcgggagtatccgctcaggggctggtccggcagcggcggcatccaagaggtggtcgcgcacggcggcgaggtctgggtgtggggtgtccaggacgggacgcgcctctacctggcgaggttcgacggcaccgcgttccagcccgtcgccccgctttccggggacgtctacgtttacggcacccgcctgtgggccggcccggccggggtgtggctccagatcaaggtggtgggctcggacagcgtgatcaggccagagctgttccgccgcgtcggcgacgcctggacggccgaccctctcgccggtcagttgcagggcgggctgccggacctcaacgcgcgcagcgccaccgaagcatggaccggaagctgccgctacaacgccgacgccggacgcctcgagtcggtggcgctccgctggaacggctccacctgggcggcactgcccccgctgcccaccgagcattgcgtcggcagcgtcgcacccgccgggggcggcgcggtctgggcgctcgcctgggacacgctgtaccactgggacggcacgaggtggacctcggcacccgccggccccttcgacggggagggcgagaaggtgcgcctggacaaggacggcaacccgctcgtggtcgtcggccacacgatcaagttcgcccccgtgccgccgctgcggtacgcgggcggtgcctggcagcggttcacgacgcctggcgggacgtggacgagcgacctgtccgtcgcgccgagcgggcggatctgggtgacgggaagcacgcgcatcgactcacccgtggcgctcacgtctccctgaccggtcgctgccccacgcttcgggctcgctcgtccggacctgcaacgcgcgcagtgcgggatggcccgccagcacgtccagatcgaccgaatcgagctcgatccgcaacgcctcgagcgggacgtccatctcgcggtcgccgtcgtccgtctcataccacctgccgaccggcgccgaagaaccgtgccacccgctctgccgcgcccggctccgccacggcgagcatctccaggaggccgtcgctggacgacgccgagatgtggacgcgaccggccgcacgccacacgtcctcccggtcgcgcgtgatcgaccactcggggaagagccgctgcaagaacagcaggagcacaccctcgttcacgcgggcaccggttccagtgtgaggtgggccgtcggcgaggtgccagccggggctggtccttttccgacggcctcctcccgaacccgccgtgcgactttcaccgcaacgggctctccggtgactactacgtggatgcggtgggtcggccggtgtggatgaggtcgtggcagggttgacagacaatcaatgttttgcgtctcctttttgccatgatctgcgcccaccttggcggtgactggccgagtcggccgagatcggcgagtctgcggacgtgatgaacctggatttggtccgttgattcgcagatctcacaccggcccgcgaggagccgagatatcagctccttgcggggttgaccggtccggtcggggttgcggtctcggaggaccgccgacttctgccgcaccaatggaataccgccgaactgtgcgaccaatggttccctgccgccgctgcgttcaacacggacttgcaggcactttcgcggcccgcccggtgtgacgatggtggccttgtgttttcgagccattttcgtcacggtcgagcggtgcttgttcgccagtgatttgagcagcgaggtttgcatgacccagtgcagccggttcaatcggaagacgtcaccggccagcaggtagtattggacgaccccccggtagatcgccccgtaaactctgacgattgtgtgatcgtcttcattgaacagatggggcaggcatgcgggttttccgcgtttcaggtagggggcgcacttttctttgatcactgtttttggcacgcggagctgaacgactccgttgactgatcgacggcccttcttggtcctgcgatcactgcgttggacagtaatctcgtagccgaggaatcgcgccgcgccggttctggcgtgagtgatcagtgtcttgtccggcgacagttccagcttgaggtcgtcacgcaggaacgccgccagtcgctgtttgatatcctcggcctcgtgcttgggtccggcgaacccgagcagggtgtcgtcggcgtacctgacatagcgcagccgacgatagccgggatcgttcatgtcctggctgggcagttcgcttaattgcttacgaagttggcgcgcctggacgcggtcgcctcgtttgcgggccagtgcgagctgcttttccaccttgcggtaggtgatgctgcgtttgcgcagcccaccccggttgtactccggtatgagaaccgtttcaacaaagttgtccagtcgatgcaggtagatgttggacaggatcggcgagactacccctccttgcggcgtaccgctgagagtggcgctccagacccagtcctccagatatccggcctggagcatgttgcgcaccagccgcaggaaacggttgtcgtggattttctccgccaacaccgaaagcatgaactgatggtccagacttccgaagcagtcagagatgtctccctcaatgaaccaggtcgtccccgtccaggtttgtgcgacctcgcgcagggcgctgtggcacccccggcggggacggaacccgtgagagcggtcggaaaaagtcggctcgtagtatgcctccagcaagaggcgaatcacttcaccaacaagtttgtccgaccaggttggcagtcccagaggcctcttcttcccgttacgtttggggatgtgaatcctcttggccggcttgaatcggtagcgttcgagacgcattgcgccgatgatacggctgattttcgccggtgacatgccgtccacggtttccgcggtgactcccggtgtcatcgctccctggttggagtagatgcgcccgtaagccatcagatacaactgcggattgaacaactgtcgatacagttcattgcacggcaagtctcgtctgccgcgtccacgcaggacactcagcaccgtttcggcgttctgcattgcgcatacctcccgggtccaatgtgtccgatcacctgtgctcctttgccctgtgaacggctttcccgctctcctcggcaggacgtgacccctgcgactactacgagcactccgtcaccttagggttcgcaccccttaggtgatcccacgttcgtctctgatgtacgtccgagcatgacttaggcggcccgttcgtctccttgaatgtcctcgttggacatcgctccacgtcccgaaggttgcgccaggcggcaaaacatccccgcgcagaacgtggcaccggtttcaggtatctttccgatggacgcgtcttttcgtcgactggagactggacttcaggcaatccagctttcgccctatcatgcgggtctctcagtgacccatcttcgataccttcgcgatgttcactgatttcctagcatgctacggtccccttcacctttcagatccaggtaagccattcgacccagagatctcccttcgaatctctcccggctgcaccggggatacatcagagcgcctcgtggcgcactcggcccacacgaccttcccgccctcgctcagcggacgggtgccccaccggcgcacgagcgcctcgatgagcagcagcccgcgccccgactcggcggcgtagttcaccggacggacggtcggcagtgcgtccgacccgtcccacgcctccaccacgaccgcgccgtcgtcccgccggtaggcccggacgaccacgggatcgcccgcccgcgacccgtgcctgaccgcgttcgtggccagctcgctgatcaccgtccgggcgacgtcgtcgtccagccgccacgccccgaacgtcatcgcgacgaagtcgcgcgcctgcttgatcgcccccggatccgccttgatcacgagggttgccggttcggtcatataaccgtcacctccgaatttccgtgactccatgcacatgattcgctccgatgcgtagcgtcaccagggaagtggttcgtcacaagagcatcggtgtcatgcgctgtcccctcggaggttctccatggtcacgcggaagcccaccccccagacgctcgccttcggcgcggaggtcgcccgcctgcgtaaagagcgcgaactgtcccgagtcgagctggccaagctcgccgccgtcacccgctcgtacatcgcccaggtcgaactcggcacgacccgatgccgccaggatttcgcggagcggctggacgatggcatgaagtgcgcgccgaccctggtggacgcctggaccgaccttctgagttcggcggcctaccccaagttcttcgtcgactacccgaaggccgaggccacggccgtcctcctgcgcgcgttcgaactcacagccgtgtacgggttgttccagaccgaggcgtacatgcgcgccctcctcgataccgagcaggccgtcgagtcccgcatcaagcgtcaggccatcctgaaacggcaacatccgcccaaggtcagcgtcgtgctcagcgaaagcatcctttatgccgaggtgggcggcccgactgtcatgaaggagcagtgcgagcggctcatcgaagtggcccagatggggaacgtcgtgctccagatcgctcccaccgggcgctactggagactcgacggcccattcaacctggcaactcagcccaccggtcaggagctgctctacatggccaacgctcgcggtggagtgaccacaagcgacccggccgatatcttgtacgtcgtcggtgcgttctcctttatccaggcccacgcgctgagtccgagcgagtccctggagctcattcagaaggcggttctccggtggagctgatcaagtggcggaagtcgcagcgaagcgggtctcagggggacgcgtgcgtggagattgcggctctgcctggtggggtcggggtacgggacagcaagcagcctgagggtgggcggcttgttctcgctcccgccgctttccgggtgttgctggacgagctcaagcggtaagcacgcgtgctctagggtcgggggatggcgcgaccggcggtgggcatcgaggtgatcgcgcgtgcggtcgtccggacgtcggcggggctgctgctggcgcggttgcgcgggacggactggtggttcctgcccggtggccacgtggagcccggagagccggtggcggccgcgctcgtgcgtgaactcggcgaggaactcggcctgaccgtcccggcccccgcgatgatcgggacggtcgagtccgcctacgtggaggacggcttgcatcggcacgaggtcaacctcgtgttcgccgtcgacgtcgcggacggcgaggagttcgtcgcactagagccgcatctggagttcggggtcgtgccggtcgaggcgctgggcgacgtggagatccgtccggcgacgctggggcgggccgtgcgcgcctggctggacgatgcccgtccgttcgccgtcgcgctgtagccgtcagatctggaagccgcgcgcgtactggtcggtgtgcgcggccaggtcggcggtgtcgcccgccatgacgaccctgccgccgcgcatgagcaccacccggtcggcgatccgggtggcggtgagcatggccacgtcgtgcgtgatcatcaggacggccgctccggcggcggcgtaccggtagagggtcgtccacaccgcgtaggcgttctcggtgtcgagggaggcggccggttcgtcggcgatgaggacggcgggtgcgggcaggagcgcggcggcgagcgcggcgcgctggatctgcccgccggaatgctgtttcggggagaggtcgaacaggtccgtggggtagcgggcggcggcgcacgcgcggtcgaggctccattgcccgtgccggcgttcgagtccgcgcagttgcgcgcccacggtttcccagggatcgaaggccgtgacgccgtcctgcgggacgaacccgacggtgcggccgcgaaggcggagccattcgcggcggccgtcgacgggttcgccgttgacgctcacttgcccggtgctgcgggccgtttccggcagtgaaccggtcagcgccgccgcggccatgga

SEQ ID NO: 152 - DNA, 22 bp, Unknown
  synthetic
csggsgssgcsggsttcatsgg

SEQ ID NO: 153 - DNA, 24 bp, Unknown
  synthetic
gggwrctggyrsggsccgtagttg

SEQ ID NO: 154 - protein, 38 aa, Actinomadura sp. 21G792
DTVTVNYDDVGYPSDIAVTIDAPATAGVGDTATFEVSV

SEQ ID NO: 155 - DNA, 27 bp, Unknown
  synthetic
  misc_feature (24)..(24): n is a, c, g, or t
acsgtsaactacgacgacgtsggntac

SEQ ID NO: 156 - DNA, 20 bp, Unknown
  synthetic
acsgtsaaytaygaygaygt

SEQ ID NO: 157 - DNA, 20 bp, Unknown
  synthetic
acytcraasgtsgcsgtrtc

SEQ ID NO: 158 - DNA, 19 bp, Unknown
  synthetic
ggctacccgtcggacatcg

SEQ ID NO: 159 - DNA, 20 bp, Unknown
  synthetic
ggacatcgccgtgaccatcg

SEQ ID NO: 160 - DNA, 19 bp, Unknown
  synthetic
ccggcgcgtcgatggtcac

SEQ ID NO: 161 - DNA, 18 bp, Unknown
  synthetic
ctcgaaggtggcggtgtc

SEQ ID NO: 162 - DNA, 19 bp, Unknown
  synthetic
gctcgtcgggttcttctac

SEQ ID NO: 163 - DNA, 18 bp, Unknown
  synthetic
gacttcgcgatagctctc

SEQ ID NO: 164 - DNA, 19 bp, Unknown
  synthetic
gcgacgaaggacccgaagg

SEQ ID NO: 165 - DNA, 19 bp, Unknown
  synthetic
cacgctggcccgccccttc

SEQ ID NO: 166 - protein, 9 aa, Actinomadura sp. 21G792
VVDVGTFTG

SEQ ID NO: 167 - protein, 8 aa, Actinomadura sp. 21G792
PAADLVFL

SEQ ID NO: 168 - protein, 10 aa, Actinomadura sp. 21G792
LLRPGGLLVA

SEQ ID NO: 169 - protein, 9 aa, Actinomadura sp. 21G792
IVEIGCNDG

SEQ ID NO: 170 - protein, 8 aa, Actinomadura sp. 21G792
GPADVLYG

SEQ ID NO: 171 - protein, 10 aa, Actinomadura sp. 21G792
LLKPDGIFVF

SEQ ID NO: 172 - protein, 9 aa, Actinomadura sp. 21G792
VLDLGGGDG

SEQ ID NO: 173 - protein, 8 aa, Actinomadura sp. 21G792
DGCDAILY

SEQ ID NO: 174 - protein, 10 aa, Actinomadura sp. 21G792
ALPEGGVCVV

SEQ ID NO: 175 - protein, 9 aa, Actinomadura sp. 21G792
HNFPLASPG

SEQ ID NO: 176 - protein, 11 aa, Actinomadura sp. 21G792
GTFFQLRGQSI
